United States Patent Application Publication US 2015/0011416 A1 - sequence listing, part 3

SEQ ID NO: 62312 - DNA, 40 bp, Homo sapiens
aactttaataatcttaaagtaaaacttaacatagttcatg

SEQ ID NO: 62313 - DNA, 40 bp, Homo sapiens
catgaactatgttaagttttactttaagattattaaagtt

SEQ ID NO: 62314 - DNA, 40 bp, Homo sapiens
actttaataatcttaaagtaaaacttaacatagttcatgg

SEQ ID NO: 62315 - DNA, 40 bp, Homo sapiens
ccatgaactatgttaagttttactttaagattattaaagt

SEQ ID NO: 62316 - DNA, 40 bp, Homo sapiens
ctttaataatcttaaagtaaaacttaacatagttcatgga

SEQ ID NO: 62317 - DNA, 40 bp, Homo sapiens
tccatgaactatgttaagttttactttaagattattaaag

SEQ ID NO: 62318 - DNA, 40 bp, Homo sapiens
tttaataatcttaaagtaaaacttaacatagttcatggaa

SEQ ID NO: 62319 - DNA, 40 bp, Homo sapiens
ttccatgaactatgttaagttttactttaagattattaaa

SEQ ID NO: 62320 - DNA, 40 bp, Homo sapiens
ttaataatcttaaagtaaaacttaacatagttcatggaaa

SEQ ID NO: 62321 - DNA, 40 bp, Homo sapiens
tttccatgaactatgttaagttttactttaagattattaa

SEQ ID NO: 62322 - DNA, 40 bp, Homo sapiens
taataatcttaaagtaaaacttaacatagttcatggaaag

SEQ ID NO: 62323 - DNA, 40 bp, Homo sapiens
ctttccatgaactatgttaagttttactttaagattatta

SEQ ID NO: 62324 - DNA, 40 bp, Homo sapiens
aataatcttaaagtaaaacttaacatagttcatggaaagg

SEQ ID NO: 62325 - DNA, 40 bp, Homo sapiens
cctttccatgaactatgttaagttttactttaagattatt

SEQ ID NO: 62326 - DNA, 40 bp, Homo sapiens
ataatcttaaagtaaaacttaacatagttcatggaaagga

SEQ ID NO: 62327 - DNA, 40 bp, Homo sapiens
tcctttccatgaactatgttaagttttactttaagattat

SEQ ID NO: 62328 - DNA, 40 bp, Homo sapiens
taatcttaaagtaaaacttaacatagttcatggaaaggaa

SEQ ID NO: 62329 - DNA, 40 bp, Homo sapiens
ttcctttccatgaactatgttaagttttactttaagatta

SEQ ID NO: 62330 - DNA, 40 bp, Homo sapiens
aatcttaaagtaaaacttaacatagttcatggaaaggaaa

SEQ ID NO: 62331 - DNA, 40 bp, Homo sapiens
tttcctttccatgaactatgttaagttttactttaagatt

SEQ ID NO: 62332 - DNA, 40 bp, Homo sapiens
atcttaaagtaaaacttaacatagttcatggaaaggaaat

SEQ ID NO: 62333 - DNA, 40 bp, Homo sapiens
atttcctttccatgaactatgttaagttttactttaagat

SEQ ID NO: 62334 - DNA, 40 bp, Homo sapiens
tcttaaagtaaaacttaacatagttcatggaaaggaaata

SEQ ID NO: 62335 - DNA, 40 bp, Homo sapiens
tatttcctttccatgaactatgttaagttttactttaaga

SEQ ID NO: 62336 - DNA, 40 bp, Homo sapiens
cttaaagtaaaacttaacatagttcatggaaaggaaatag

SEQ ID NO: 62337 - DNA, 40 bp, Homo sapiens
ctatttcctttccatgaactatgttaagttttactttaag

SEQ ID NO: 62338 - DNA, 40 bp, Homo sapiens
ttaaagtaaaacttaacatagttcatggaaaggaaataga

SEQ ID NO: 62339 - DNA, 40 bp, Homo sapiens
tctatttcctttccatgaactatgttaagttttactttaa

SEQ ID NO: 62340 - DNA, 40 bp, Homo sapiens
taaagtaaaacttaacatagttcatggaaaggaaatagaa

SEQ ID NO: 62341 - DNA, 40 bp, Homo sapiens
ttctatttcctttccatgaactatgttaagttttacttta

SEQ ID NO: 62342 - DNA, 40 bp, Homo sapiens
aaagtaaaacttaacatagttcatggaaaggaaatagaaa

SEQ ID NO: 62343 - DNA, 40 bp, Homo sapiens
tttctatttcctttccatgaactatgttaagttttacttt

SEQ ID NO: 62344 - DNA, 40 bp, Homo sapiens
aagtaaaacttaacatagttcatggaaaggaaatagaaat

SEQ ID NO: 62345 - DNA, 40 bp, Homo sapiens
atttctatttcctttccatgaactatgttaagttttactt

SEQ ID NO: 62346 - DNA, 40 bp, Homo sapiens
agtaaaacttaacatagttcatggaaaggaaatagaaatt

SEQ ID NO: 62347 - DNA, 40 bp, Homo sapiens
aatttctatttcctttccatgaactatgttaagttttact

SEQ ID NO: 62348 - DNA, 40 bp, Homo sapiens
gtaaaacttaacatagttcatggaaaggaaatagaaattt

SEQ ID NO: 62349 - DNA, 40 bp, Homo sapiens
aaatttctatttcctttccatgaactatgttaagttttac

SEQ ID NO: 62350 - DNA, 40 bp, Homo sapiens
taaaacttaacatagttcatggaaaggaaatagaaatttt

SEQ ID NO: 62351 - DNA, 40 bp, Homo sapiens
aaaatttctatttcctttccatgaactatgttaagtttta

SEQ ID NO: 62352 - DNA, 40 bp, Homo sapiens
aaaacttaacatagttcatggaaaggaaatagaaatttta

SEQ ID NO: 62353 - DNA, 40 bp, Homo sapiens
taaaatttctatttcctttccatgaactatgttaagtttt

SEQ ID NO: 62354 - DNA, 40 bp, Homo sapiens
aaacttaacatagttcatggaaaggaaatagaaattttac

SEQ ID NO: 62355 - DNA, 40 bp, Homo sapiens
gtaaaatttctatttcctttccatgaactatgttaagttt

SEQ ID NO: 62356 - DNA, 40 bp, Homo sapiens
aacttaacatagttcatggaaaggaaatagaaattttacc

SEQ ID NO: 62357 - DNA, 40 bp, Homo sapiens
ggtaaaatttctatttcctttccatgaactatgttaagtt

SEQ ID NO: 62358 - DNA, 40 bp, Homo sapiens
acttaacatagttcatggaaaggaaatagaaattttaccc

SEQ ID NO: 62359 - DNA, 40 bp, Homo sapiens
gggtaaaatttctatttcctttccatgaactatgttaagt

SEQ ID NO: 62360 - DNA, 40 bp, Homo sapiens
cttaacatagttcatggaaaggaaatagaaattttaccct

SEQ ID NO: 62361 - DNA, 40 bp, Homo sapiens
agggtaaaatttctatttcctttccatgaactatgttaag

SEQ ID NO: 62362 - DNA, 40 bp, Homo sapiens
ttaacatagttcatggaaaggaaatagaaattttacccta

SEQ ID NO: 62363 - DNA, 40 bp, Homo sapiens
tagggtaaaatttctatttcctttccatgaactatgttaa

SEQ ID NO: 62364 - DNA, 40 bp, Homo sapiens
taacatagttcatggaaaggaaatagaaattttaccctag

SEQ ID NO: 62365 - DNA, 40 bp, Homo sapiens
ctagggtaaaatttctatttcctttccatgaactatgtta

SEQ ID NO: 62366 - DNA, 40 bp, Homo sapiens
aacatagttcatggaaaggaaatagaaattttaccctagt

SEQ ID NO: 62367 - DNA, 40 bp, Homo sapiens
actagggtaaaatttctatttcctttccatgaactatgtt

SEQ ID NO: 62368 - DNA, 40 bp, Homo sapiens
acatagttcatggaaaggaaatagaaattttaccctagta

SEQ ID NO: 62369 - DNA, 40 bp, Homo sapiens
tactagggtaaaatttctatttcctttccatgaactatgt

SEQ ID NO: 62370 - DNA, 40 bp, Homo sapiens
catagttcatggaaaggaaatagaaattttaccctagtac

SEQ ID NO: 62371 - DNA, 40 bp, Homo sapiens
gtactagggtaaaatttctatttcctttccatgaactatg

SEQ ID NO: 62372 - DNA, 40 bp, Homo sapiens
atagttcatggaaaggaaatagaaattttaccctagtact

SEQ ID NO: 62373 - DNA, 40 bp, Homo sapiens
agtactagggtaaaatttctatttcctttccatgaactat

SEQ ID NO: 62374 - DNA, 40 bp, Homo sapiens
tagttcatggaaaggaaatagaaattttaccctagtactc

SEQ ID NO: 62375 - DNA, 40 bp, Homo sapiens
gagtactagggtaaaatttctatttcctttccatgaacta

SEQ ID NO: 62376 - DNA, 40 bp, Homo sapiens
agttcatggaaaggaaatagaaattttaccctagtactct

SEQ ID NO: 62377 - DNA, 40 bp, Homo sapiens
agagtactagggtaaaatttctatttcctttccatgaact

SEQ ID NO: 62378 - DNA, 40 bp, Homo sapiens
gttcatggaaaggaaatagaaattttaccctagtactctt

SEQ ID NO: 62379 - DNA, 40 bp, Homo sapiens
aagagtactagggtaaaatttctatttcctttccatgaac

SEQ ID NO: 62380 - DNA, 40 bp, Homo sapiens
ttcatggaaaggaaatagaaattttaccctagtactcttt

SEQ ID NO: 62381 - DNA, 40 bp, Homo sapiens
aaagagtactagggtaaaatttctatttcctttccatgaa

SEQ ID NO: 62382 - DNA, 40 bp, Homo sapiens
tcatggaaaggaaatagaaattttaccctagtactctttt

SEQ ID NO: 62383 - DNA, 40 bp, Homo sapiens
aaaagagtactagggtaaaatttctatttcctttccatga

SEQ ID NO: 62384 - DNA, 40 bp, Homo sapiens
catggaaaggaaatagaaattttaccctagtactcttttt

SEQ ID NO: 62385 - DNA, 40 bp, Homo sapiens
aaaaagagtactagggtaaaatttctatttcctttccatg

SEQ ID NO: 62386 - DNA, 40 bp, Homo sapiens
atggaaaggaaatagaaattttaccctagtactctttttt

SEQ ID NO: 62387 - DNA, 40 bp, Homo sapiens
aaaaaagagtactagggtaaaatttctatttcctttccat

SEQ ID NO: 62388 - DNA, 40 bp, Homo sapiens
tggaaaggaaatagaaattttaccctagtactcttttttt

SEQ ID NO: 62389 - DNA, 40 bp, Homo sapiens
aaaaaaagagtactagggtaaaatttctatttcctttcca

SEQ ID NO: 62390 - DNA, 40 bp, Homo sapiens
ggaaaggaaatagaaattttaccctagtactctttttttt

SEQ ID NO: 62391 - DNA, 40 bp, Homo sapiens
aaaaaaaagagtactagggtaaaatttctatttcctttcc

SEQ ID NO: 62392 - DNA, 40 bp, Homo sapiens
gaaaggaaatagaaattttaccctagtactcttttttttt

SEQ ID NO: 62393 - DNA, 40 bp, Homo sapiens
aaaaaaaaagagtactagggtaaaatttctatttcctttc

SEQ ID NO: 62394 - DNA, 40 bp, Homo sapiens
aaaggaaatagaaattttaccctagtactctttttttttt

SEQ ID NO: 62395 - DNA, 40 bp, Homo sapiens
aaaaaaaaaagagtactagggtaaaatttctatttccttt

SEQ ID NO: 62396 - DNA, 40 bp, Homo sapiens
aaggaaatagaaattttaccctagtactcttttttttttt

SEQ ID NO: 62397 - DNA, 40 bp, Homo sapiens
aaaaaaaaaaagagtactagggtaaaatttctatttcctt

SEQ ID NO: 62398 - DNA, 40 bp, Homo sapiens
aggaaatagaaattttaccctagtactctttttttttttt

SEQ ID NO: 62399 - DNA, 40 bp, Homo sapiens
aaaaaaaaaaaagagtactagggtaaaatttctatttcct

SEQ ID NO: 62400 - DNA, 40 bp, Homo sapiens
ggaaatagaaattttaccctagtactcttttttttttttt

SEQ ID NO: 62401 - DNA, 40 bp, Homo sapiens
aaaaaaaaaaaaagagtactagggtaaaatttctatttcc

SEQ ID NO: 62402 - DNA, 40 bp, Homo sapiens
gaaatagaaattttaccctagtactctttttttttttttt

SEQ ID NO: 62403 - DNA, 40 bp, Homo sapiens
aaaaaaaaaaaaaagagtactagggtaaaatttctatttc

SEQ ID NO: 62404 - DNA, 40 bp, Homo sapiens
aaatagaaattttaccctagtactcttttttttttttttt

SEQ ID NO: 62405 - DNA, 40 bp, Homo sapiens
aaaaaaaaaaaaaaagagtactagggtaaaatttctattt

SEQ ID NO: 62406 - DNA, 40 bp, Homo sapiens
aatagaaattttaccctagtactctttttttttttttttt

SEQ ID NO: 62407 - DNA, 40 bp, Homo sapiens
aaaaaaaaaaaaaaaagagtactagggtaaaatttctatt

SEQ ID NO: 62408 - DNA, 40 bp, Homo sapiens
atagaaattttaccctagtactcttttttttttttttttt

SEQ ID NO: 62409 - DNA, 40 bp, Homo sapiens
aaaaaaaaaaaaaaaaagagtactagggtaaaatttctat

SEQ ID NO: 62410 - DNA, 40 bp, Homo sapiens
tagaaattttaccctagtactctttttttttttttttttt

SEQ ID NO: 62411 - DNA, 40 bp, Homo sapiens
aaaaaaaaaaaaaaaaaagagtactagggtaaaatttcta

SEQ ID NO: 62412 - DNA, 40 bp, Homo sapiens
agaaattttaccctagtactcttttttttttttttttttt

SEQ ID NO: 62413 - DNA, 40 bp, Homo sapiens
aaaaaaaaaaaaaaaaaaagagtactagggtaaaatttct

SEQ ID NO: 62414 - DNA, 40 bp, Homo sapiens
gaaattttaccctagtactctttttttttttttttttttt

SEQ ID NO: 62415 - DNA, 40 bp, Homo sapiens
aaaaaaaaaaaaaaaaaaaagagtactagggtaaaatttc

SEQ ID NO: 62416 - DNA, 40 bp, Homo sapiens
aaattttaccctagtactcttttttttttttttttttttt

SEQ ID NO: 62417 - DNA, 40 bp, Homo sapiens
aaaaaaaaaaaaaaaaaaaaagagtactagggtaaaattt

SEQ ID NO: 62418 - DNA, 40 bp, Homo sapiens
aattttaccctagtactctttttttttttttttttttttt

SEQ ID NO: 62419 - DNA, 40 bp, Homo sapiens
aaaaaaaaaaaaaaaaaaaaaagagtactagggtaaaatt

SEQ ID NO: 62420 - DNA, 40 bp, Homo sapiens
attttaccctagtactcttttttttttttttttttttttt

SEQ ID NO: 62421 - DNA, 40 bp, Homo sapiens
aaaaaaaaaaaaaaaaaaaaaaagagtactagggtaaaat

SEQ ID NO: 62422 - DNA, 40 bp, Homo sapiens
ttttaccctagtactctttttttttttttttttttttttt

SEQ ID NO: 62423 - DNA, 40 bp, Homo sapiens
aaaaaaaaaaaaaaaaaaaaaaaagagtactagggtaaaa

SEQ ID NO: 62424 - DNA, 40 bp, Homo sapiens
tttaccctagtactcttttttttttttttttttttttttg

SEQ ID NO: 62425 - DNA, 40 bp, Homo sapiens
caaaaaaaaaaaaaaaaaaaaaaaagagtactagggtaaa

SEQ ID NO: 62426 - DNA, 40 bp, Homo sapiens
ttaccctagtactcttttttttttttttttttttttttga

SEQ ID NO: 62427 - DNA, 40 bp, Homo sapiens
tcaaaaaaaaaaaaaaaaaaaaaaaagagtactagggtaa

SEQ ID NO: 62428 - DNA, 40 bp, Homo sapiens
taccctagtactcttttttttttttttttttttttttgag

SEQ ID NO: 62429 - DNA, 40 bp, Homo sapiens
ctcaaaaaaaaaaaaaaaaaaaaaaaagagtactagggta

SEQ ID NO: 62430 - DNA, 40 bp, Homo sapiens
accctagtactcttttttttttttttttttttttttgagg

SEQ ID NO: 62431 - DNA, 40 bp, Homo sapiens
cctcaaaaaaaaaaaaaaaaaaaaaaaagagtactagggt

SEQ ID NO: 62432 - DNA, 40 bp, Homo sapiens
ccctagtactcttttttttttttttttttttttttgaggc

SEQ ID NO: 62433 - DNA, 40 bp, Homo sapiens
gcctcaaaaaaaaaaaaaaaaaaaaaaaagagtactaggg

SEQ ID NO: 62434 - DNA, 40 bp, Homo sapiens
cctagtactcttttttttttttttttttttttttgaggca

SEQ ID NO: 62435 - DNA, 40 bp, Homo sapiens
tgcctcaaaaaaaaaaaaaaaaaaaaaaaagagtactagg

SEQ ID NO: 62436 - DNA, 40 bp, Homo sapiens
ctagtactcttttttttttttttttttttttttgaggcag

SEQ ID NO: 62437 - DNA, 40 bp, Homo sapiens
ctgcctcaaaaaaaaaaaaaaaaaaaaaaaagagtactag

SEQ ID NO: 62438 - DNA, 40 bp, Homo sapiens
tagtactcttttttttttttttttttttttttgaggcaga

SEQ ID NO: 62439 - DNA, 40 bp, Homo sapiens
tctgcctcaaaaaaaaaaaaaaaaaaaaaaaagagtacta

SEQ ID NO: 62440 - DNA, 40 bp, Homo sapiens
agtactcttttttttttttttttttttttttgaggcagag

SEQ ID NO: 62441 - DNA, 40 bp, Homo sapiens
ctctgcctcaaaaaaaaaaaaaaaaaaaaaaaagagtact

SEQ ID NO: 62442 - DNA, 40 bp, Homo sapiens
gtactcttttttttttttttttttttttttgaggcagagt

SEQ ID NO: 62443 - DNA, 40 bp, Homo sapiens
actctgcctcaaaaaaaaaaaaaaaaaaaaaaaagagtac

SEQ ID NO: 62444 - DNA, 40 bp, Homo sapiens
tactcttttttttttttttttttttttttgaggcagagtc

SEQ ID NO: 62445 - DNA, 40 bp, Homo sapiens
gactctgcctcaaaaaaaaaaaaaaaaaaaaaaaagagta

SEQ ID NO: 62446 - DNA, 40 bp, Homo sapiens
actcttttttttttttttttttttttttgaggcagagtct

SEQ ID NO: 62447 - DNA, 40 bp, Homo sapiens
agactctgcctcaaaaaaaaaaaaaaaaaaaaaaaagagt

SEQ ID NO: 62448 - DNA, 40 bp, Homo sapiens
ctcttttttttttttttttttttttttgaggcagagtctc

SEQ ID NO: 62449 - DNA, 40 bp, Homo sapiens
gagactctgcctcaaaaaaaaaaaaaaaaaaaaaaaagag

SEQ ID NO: 62450 - DNA, 40 bp, Homo sapiens
tcttttttttttttttttttttttttgaggcagagtctcc

SEQ ID NO: 62451 - DNA, 40 bp, Homo sapiens
ggagactctgcctcaaaaaaaaaaaaaaaaaaaaaaaaga

SEQ ID NO: 62452 - DNA, 40 bp, Homo sapiens
cttttttttttttttttttttttttgaggcagagtctccc

SEQ ID NO: 62453 - DNA, 40 bp, Homo sapiens
gggagactctgcctcaaaaaaaaaaaaaaaaaaaaaaaag

SEQ ID NO: 62454 - DNA, 40 bp, Homo sapiens
ttttttttttttttttttttttttgaggcagagtctccct

SEQ ID NO: 62455 - DNA, 40 bp, Homo sapiens
agggagactctgcctcaaaaaaaaaaaaaaaaaaaaaaaa

SEQ ID NO: 62456 - DNA, 40 bp, Homo sapiens
tttttttttttttttttttttttgaggcagagtctccctc

SEQ ID NO: 62457 - DNA, 40 bp, Homo sapiens
gagggagactctgcctcaaaaaaaaaaaaaaaaaaaaaaa

SEQ ID NO: 62458 - DNA, 40 bp, Homo sapiens
ttttttttttttttttttttttgaggcagagtctccctct

SEQ ID NO: 62459 - DNA, 40 bp, Homo sapiens
agagggagactctgcctcaaaaaaaaaaaaaaaaaaaaaa

SEQ ID NO: 62460 - DNA, 40 bp, Homo sapiens
tttttttttttttttttttttgaggcagagtctccctctg

SEQ ID NO: 62461 - DNA, 40 bp, Homo sapiens
cagagggagactctgcctcaaaaaaaaaaaaaaaaaaaaa

SEQ ID NO: 62462 - DNA, 40 bp, Homo sapiens
ttttttttttttttttttttgaggcagagtctccctctgt

SEQ ID NO: 62463 - DNA, 40 bp, Homo sapiens
acagagggagactctgcctcaaaaaaaaaaaaaaaaaaaa

SEQ ID NO: 62464 - DNA, 40 bp, Homo sapiens
tttttttttttttttttttgaggcagagtctccctctgtc

SEQ ID NO: 62465 - DNA, 40 bp, Homo sapiens
gacagagggagactctgcctcaaaaaaaaaaaaaaaaaaa

SEQ ID NO: 62466 - DNA, 40 bp, Homo sapiens
ttttttttttttttttttgaggcagagtctccctctgtca

SEQ ID NO: 62467 - DNA, 40 bp, Homo sapiens
tgacagagggagactctgcctcaaaaaaaaaaaaaaaaaa

SEQ ID NO: 62468 - DNA, 40 bp, Homo sapiens
tttttttttttttttttgaggcagagtctccctctgtcac

SEQ ID NO: 62469 - DNA, 40 bp, Homo sapiens
gtgacagagggagactctgcctcaaaaaaaaaaaaaaaaa

SEQ ID NO: 62470 - DNA, 40 bp, Homo sapiens
ttttttttttttttttgaggcagagtctccctctgtcacc

SEQ ID NO: 62471 - DNA, 40 bp, Homo sapiens
ggtgacagagggagactctgcctcaaaaaaaaaaaaaaaa

SEQ ID NO: 62472 - DNA, 40 bp, Homo sapiens
tttttttttttttttgaggcagagtctccctctgtcaccc

SEQ ID NO: 62473 - DNA, 40 bp, Homo sapiens
gggtgacagagggagactctgcctcaaaaaaaaaaaaaaa

SEQ ID NO: 62474 - DNA, 40 bp, Homo sapiens
ttttttttttttttgaggcagagtctccctctgtcaccca

SEQ ID NO: 62475 - DNA, 40 bp, Homo sapiens
tgggtgacagagggagactctgcctcaaaaaaaaaaaaaa

SEQ ID NO: 62476 - DNA, 40 bp, Homo sapiens
tttttttttttttgaggcagagtctccctctgtcacccag

SEQ ID NO: 62477 - DNA, 40 bp, Homo sapiens
ctgggtgacagagggagactctgcctcaaaaaaaaaaaaa

SEQ ID NO: 62478 - DNA, 40 bp, Homo sapiens
ttttttttttttgaggcagagtctccctctgtcacccagg

SEQ ID NO: 62479 - DNA, 40 bp, Homo sapiens
cctgggtgacagagggagactctgcctcaaaaaaaaaaaa

SEQ ID NO: 62480 - DNA, 40 bp, Homo sapiens
tttttttttttgaggcagagtctccctctgtcacccaggc

SEQ ID NO: 62481 - DNA, 40 bp, Homo sapiens
gcctgggtgacagagggagactctgcctcaaaaaaaaaaa

SEQ ID NO: 62482 - DNA, 40 bp, Homo sapiens
ttttttttttgaggcagagtctccctctgtcacccaggct

SEQ ID NO: 62483 - DNA, 40 bp, Homo sapiens
agcctgggtgacagagggagactctgcctcaaaaaaaaaa

SEQ ID NO: 62484 - DNA, 40 bp, Homo sapiens
tttttttttgaggcagagtctccctctgtcacccaggctg

SEQ ID NO: 62485 - DNA, 40 bp, Homo sapiens
cagcctgggtgacagagggagactctgcctcaaaaaaaaa

SEQ ID NO: 62486 - DNA, 40 bp, Homo sapiens
ttttttttgaggcagagtctccctctgtcacccaggctgg

SEQ ID NO: 62487 - DNA, 40 bp, Homo sapiens
ccagcctgggtgacagagggagactctgcctcaaaaaaaa

SEQ ID NO: 62488 - DNA, 40 bp, Homo sapiens
tttttttgaggcagagtctccctctgtcacccaggctgga

SEQ ID NO: 62489 - DNA, 40 bp, Homo sapiens
tccagcctgggtgacagagggagactctgcctcaaaaaaa

SEQ ID NO: 62490 - DNA, 40 bp, Homo sapiens
ttttttgaggcagagtctccctctgtcacccaggctggag

SEQ ID NO: 62491 - DNA, 40 bp, Homo sapiens
ctccagcctgggtgacagagggagactctgcctcaaaaaa

SEQ ID NO: 62492 - DNA, 40 bp, Homo sapiens
tttttgaggcagagtctccctctgtcacccaggctggagt

SEQ ID NO: 62493 - DNA, 40 bp, Homo sapiens
actccagcctgggtgacagagggagactctgcctcaaaaa

SEQ ID NO: 62494 - DNA, 40 bp, Homo sapiens
ttttgaggcagagtctccctctgtcacccaggctggagtg

SEQ ID NO: 62495 - DNA, 40 bp, Homo sapiens
cactccagcctgggtgacagagggagactctgcctcaaaa

SEQ ID NO: 62496 - DNA, 40 bp, Homo sapiens
tttgaggcagagtctccctctgtcacccaggctggagtgc

SEQ ID NO: 62497 - DNA, 40 bp, Homo sapiens
gcactccagcctgggtgacagagggagactctgcctcaaa

SEQ ID NO: 62498 - DNA, 40 bp, Homo sapiens
ttgaggcagagtctccctctgtcacccaggctggagtgca

SEQ ID NO: 62499 - DNA, 40 bp, Homo sapiens
tgcactccagcctgggtgacagagggagactctgcctcaa

SEQ ID NO: 62500 - DNA, 40 bp, Homo sapiens
tgaggcagagtctccctctgtcacccaggctggagtgcag

SEQ ID NO: 62501 - DNA, 40 bp, Homo sapiens
ctgcactccagcctgggtgacagagggagactctgcctca

SEQ ID NO: 62502 - DNA, 40 bp, Homo sapiens
gaggcagagtctccctctgtcacccaggctggagtgcagt

SEQ ID NO: 62503 - DNA, 40 bp, Homo sapiens
actgcactccagcctgggtgacagagggagactctgcctc

SEQ ID NO: 62504 - DNA, 40 bp, Homo sapiens
aggcagagtctccctctgtcacccaggctggagtgcagtg

SEQ ID NO: 62505 - DNA, 40 bp, Homo sapiens
cactgcactccagcctgggtgacagagggagactctgcct

SEQ ID NO: 62506 - DNA, 40 bp, Homo sapiens
ggcagagtctccctctgtcacccaggctggagtgcagtgg

SEQ ID NO: 62507 - DNA, 40 bp, Homo sapiens
ccactgcactccagcctgggtgacagagggagactctgcc

SEQ ID NO: 62508 - DNA, 40 bp, Homo sapiens
gcagagtctccctctgtcacccaggctggagtgcagtggt

SEQ ID NO: 62509 - DNA, 40 bp, Homo sapiens
accactgcactccagcctgggtgacagagggagactctgc

SEQ ID NO: 62510 - DNA, 40 bp, Homo sapiens
cagagtctccctctgtcacccaggctggagtgcagtggtg

SEQ ID NO: 62511 - DNA, 40 bp, Homo sapiens
caccactgcactccagcctgggtgacagagggagactctg

SEQ ID NO: 62512 - DNA, 40 bp, Homo sapiens
agagtctccctctgtcacccaggctggagtgcagtggtgg

SEQ ID NO: 62513 - DNA, 40 bp, Homo sapiens
ccaccactgcactccagcctgggtgacagagggagactct

SEQ ID NO: 62514 - DNA, 40 bp, Homo sapiens
gagtctccctctgtcacccaggctggagtgcagtggtggg

SEQ ID NO: 62515 - DNA, 40 bp, Homo sapiens
cccaccactgcactccagcctgggtgacagagggagactc

SEQ ID NO: 62516 - DNA, 40 bp, Homo sapiens
agtctccctctgtcacccaggctggagtgcagtggtggga

SEQ ID NO: 62517 - DNA, 40 bp, Homo sapiens
tcccaccactgcactccagcctgggtgacagagggagact

SEQ ID NO: 62518 - DNA, 40 bp, Homo sapiens
gtctccctctgtcacccaggctggagtgcagtggtgggat

SEQ ID NO: 62519 - DNA, 40 bp, Homo sapiens
atcccaccactgcactccagcctgggtgacagagggagac

SEQ ID NO: 62520 - DNA, 40 bp, Homo sapiens
tctccctctgtcacccaggctggagtgcagtggtgggatc

SEQ ID NO: 62521 - DNA, 40 bp, Homo sapiens
gatcccaccactgcactccagcctgggtgacagagggaga

SEQ ID NO: 62522 - DNA, 40 bp, Homo sapiens
ctccctctgtcacccaggctggagtgcagtggtgggatct

SEQ ID NO: 62523 - DNA, 40 bp, Homo sapiens
agatcccaccactgcactccagcctgggtgacagagggag

SEQ ID NO: 62524 - DNA, 40 bp, Homo sapiens
tccctctgtcacccaggctggagtgcagtggtgggatctt

SEQ ID NO: 62525 - DNA, 40 bp, Homo sapiens
aagatcccaccactgcactccagcctgggtgacagaggga

SEQ ID NO: 62526 - DNA, 40 bp, Homo sapiens
ccctctgtcacccaggctggagtgcagtggtgggatcttg

SEQ ID NO: 62527 - DNA, 40 bp, Homo sapiens
caagatcccaccactgcactccagcctgggtgacagaggg

SEQ ID NO: 62528 - DNA, 40 bp, Homo sapiens
cctctgtcacccaggctggagtgcagtggtgggatcttgg

SEQ ID NO: 62529 - DNA, 40 bp, Homo sapiens
ccaagatcccaccactgcactccagcctgggtgacagagg

SEQ ID NO: 62530 - DNA, 40 bp, Homo sapiens
ctctgtcacccaggctggagtgcagtggtgggatcttggc

SEQ ID NO: 62531 - DNA, 40 bp, Homo sapiens
gccaagatcccaccactgcactccagcctgggtgacagag

SEQ ID NO: 62532 - DNA, 40 bp, Homo sapiens
tctgtcacccaggctggagtgcagtggtgggatcttggct

SEQ ID NO: 62533 - DNA, 40 bp, Homo sapiens
agccaagatcccaccactgcactccagcctgggtgacaga

SEQ ID NO: 62534 - DNA, 40 bp, Homo sapiens
ctgtcacccaggctggagtgcagtggtgggatcttggctg

SEQ ID NO: 62535 - DNA, 40 bp, Homo sapiens
cagccaagatcccaccactgcactccagcctgggtgacag

SEQ ID NO: 62536 - DNA, 40 bp, Homo sapiens
tgtcacccaggctggagtgcagtggtgggatcttggctga

SEQ ID NO: 62537 - DNA, 40 bp, Homo sapiens
tcagccaagatcccaccactgcactccagcctgggtgaca

SEQ ID NO: 62538 - DNA, 40 bp, Homo sapiens
gtcacccaggctggagtgcagtggtgggatcttggctgat

SEQ ID NO: 62539 - DNA, 40 bp, Homo sapiens
atcagccaagatcccaccactgcactccagcctgggtgac

SEQ ID NO: 62540 - DNA, 40 bp, Homo sapiens
tcacccaggctggagtgcagtggtgggatcttggctgatt

SEQ ID NO: 62541 - DNA, 40 bp, Homo sapiens
aatcagccaagatcccaccactgcactccagcctgggtga

SEQ ID NO: 62542 - DNA, 40 bp, Homo sapiens
cacccaggctggagtgcagtggtgggatcttggctgattg

SEQ ID NO: 62543 - DNA, 40 bp, Homo sapiens
caatcagccaagatcccaccactgcactccagcctgggtg

SEQ ID NO: 62544 - DNA, 40 bp, Homo sapiens
acccaggctggagtgcagtggtgggatcttggctgattgc

SEQ ID NO: 62545 - DNA, 40 bp, Homo sapiens
gcaatcagccaagatcccaccactgcactccagcctgggt

SEQ ID NO: 62546 - DNA, 40 bp, Homo sapiens
cccaggctggagtgcagtggtgggatcttggctgattgca

SEQ ID NO: 62547 - DNA, 40 bp, Homo sapiens
tgcaatcagccaagatcccaccactgcactccagcctggg

SEQ ID NO: 62548 - DNA, 40 bp, Homo sapiens
ccaggctggagtgcagtggtgggatcttggctgattgcaa

SEQ ID NO: 62549 - DNA, 40 bp, Homo sapiens
ttgcaatcagccaagatcccaccactgcactccagcctgg

SEQ ID NO: 62550 - DNA, 40 bp, Homo sapiens
caggctggagtgcagtggtgggatcttggctgattgcaac

SEQ ID NO: 62551 - DNA, 40 bp, Homo sapiens
gttgcaatcagccaagatcccaccactgcactccagcctg

SEQ ID NO: 62552 - DNA, 40 bp, Homo sapiens
aggctggagtgcagtggtgggatcttggctgattgcaacc

SEQ ID NO: 62553 - DNA, 40 bp, Homo sapiens
ggttgcaatcagccaagatcccaccactgcactccagcct

SEQ ID NO: 62554 - DNA, 40 bp, Homo sapiens
ggctggagtgcagtggtgggatcttggctgattgcaacct

SEQ ID NO: 62555 - DNA, 40 bp, Homo sapiens
aggttgcaatcagccaagatcccaccactgcactccagcc

SEQ ID NO: 62556 - DNA, 40 bp, Homo sapiens
gctggagtgcagtggtgggatcttggctgattgcaacctc

SEQ ID NO: 62557 - DNA, 40 bp, Homo sapiens
gaggttgcaatcagccaagatcccaccactgcactccagc

SEQ ID NO: 62558 - DNA, 40 bp, Homo sapiens
ctggagtgcagtggtgggatcttggctgattgcaacctcc

SEQ ID NO: 62559 - DNA, 40 bp, Homo sapiens
ggaggttgcaatcagccaagatcccaccactgcactccag

SEQ ID NO: 62560 - DNA, 40 bp, Homo sapiens
tggagtgcagtggtgggatcttggctgattgcaacctcct

SEQ ID NO: 62561 - DNA, 40 bp, Homo sapiens
aggaggttgcaatcagccaagatcccaccactgcactcca

SEQ ID NO: 62562 - DNA, 40 bp, Homo sapiens
ggagtgcagtggtgggatcttggctgattgcaacctcctc

SEQ ID NO: 62563 - DNA, 40 bp, Homo sapiens
gaggaggttgcaatcagccaagatcccaccactgcactcc

SEQ ID NO: 62564 - DNA, 40 bp, Homo sapiens
gagtgcagtggtgggatcttggctgattgcaacctcctcc

SEQ ID NO: 62565 - DNA, 40 bp, Homo sapiens
ggaggaggttgcaatcagccaagatcccaccactgcactc

SEQ ID NO: 62566 - DNA, 40 bp, Homo sapiens
agtgcagtggtgggatcttggctgattgcaacctcctcct

SEQ ID NO: 62567 - DNA, 40 bp, Homo sapiens
aggaggaggttgcaatcagccaagatcccaccactgcact

SEQ ID NO: 62568 - DNA, 40 bp, Homo sapiens
gtgcagtggtgggatcttggctgattgcaacctcctcctc

SEQ ID NO: 62569 - DNA, 40 bp, Homo sapiens
gaggaggaggttgcaatcagccaagatcccaccactgcac

SEQ ID NO: 62570 - DNA, 40 bp, Homo sapiens
tgcagtggtgggatcttggctgattgcaacctcctcctcc

SEQ ID NO: 62571 - DNA, 40 bp, Homo sapiens
ggaggaggaggttgcaatcagccaagatcccaccactgca

SEQ ID NO: 62572 - DNA, 40 bp, Homo sapiens
gcagtggtgggatcttggctgattgcaacctcctcctcct

SEQ ID NO: 62573 - DNA, 40 bp, Homo sapiens
aggaggaggaggttgcaatcagccaagatcccaccactgc

SEQ ID NO: 62574 - DNA, 40 bp, Homo sapiens
cagtggtgggatcttggctgattgcaacctcctcctcctg

SEQ ID NO: 62575 - DNA, 40 bp, Homo sapiens
caggaggaggaggttgcaatcagccaagatcccaccactg

SEQ ID NO: 62576 - DNA, 40 bp, Homo sapiens
agtggtgggatcttggctgattgcaacctcctcctcctgg

SEQ ID NO: 62577 - DNA, 40 bp, Homo sapiens
ccaggaggaggaggttgcaatcagccaagatcccaccact

SEQ ID NO: 62578 - DNA, 40 bp, Homo sapiens
gtggtgggatcttggctgattgcaacctcctcctcctggg

SEQ ID NO: 62579 - DNA, 40 bp, Homo sapiens
cccaggaggaggaggttgcaatcagccaagatcccaccac

SEQ ID NO: 62580 - DNA, 40 bp, Homo sapiens
tggtgggatcttggctgattgcaacctcctcctcctgggt

SEQ ID NO: 62581 - DNA, 40 bp, Homo sapiens
acccaggaggaggaggttgcaatcagccaagatcccacca

SEQ ID NO: 62582 - DNA, 40 bp, Homo sapiens
ggtgggatcttggctgattgcaacctcctcctcctgggtt

SEQ ID NO: 62583 - DNA, 40 bp, Homo sapiens
aacccaggaggaggaggttgcaatcagccaagatcccacc

SEQ ID NO: 62584 - DNA, 40 bp, Homo sapiens
gtgggatcttggctgattgcaacctcctcctcctgggttc

SEQ ID NO: 62585 - DNA, 40 bp, Homo sapiens
gaacccaggaggaggaggttgcaatcagccaagatcccac

SEQ ID NO: 62586 - DNA, 40 bp, Homo sapiens
tgggatcttggctgattgcaacctcctcctcctgggttca

SEQ ID NO: 62587 - DNA, 40 bp, Homo sapiens
tgaacccaggaggaggaggttgcaatcagccaagatccca

SEQ ID NO: 62588 - DNA, 40 bp, Homo sapiens
gggatcttggctgattgcaacctcctcctcctgggttcaa

SEQ ID NO: 62589 - DNA, 40 bp, Homo sapiens
ttgaacccaggaggaggaggttgcaatcagccaagatccc

SEQ ID NO: 62590 - DNA, 40 bp, Homo sapiens
ggatcttggctgattgcaacctcctcctcctgggttcaag

SEQ ID NO: 62591 - DNA, 40 bp, Homo sapiens
cttgaacccaggaggaggaggttgcaatcagccaagatcc

SEQ ID NO: 62592 - DNA, 40 bp, Homo sapiens
gatcttggctgattgcaacctcctcctcctgggttcaagc

SEQ ID NO: 62593 - DNA, 40 bp, Homo sapiens
gcttgaacccaggaggaggaggttgcaatcagccaagatc

SEQ ID NO: 62594 - DNA, 40 bp, Homo sapiens
atcttggctgattgcaacctcctcctcctgggttcaagca

SEQ ID NO: 62595 - DNA, 40 bp, Homo sapiens
tgcttgaacccaggaggaggaggttgcaatcagccaagat

SEQ ID NO: 62596 - DNA, 40 bp, Homo sapiens
tcttggctgattgcaacctcctcctcctgggttcaagcaa

SEQ ID NO: 62597 - DNA, 40 bp, Homo sapiens
ttgcttgaacccaggaggaggaggttgcaatcagccaaga

SEQ ID NO: 62598 - DNA, 40 bp, Homo sapiens
cttggctgattgcaacctcctcctcctgggttcaagcaat

SEQ ID NO: 62599 - DNA, 40 bp, Homo sapiens
attgcttgaacccaggaggaggaggttgcaatcagccaag

SEQ ID NO: 62600 - DNA, 40 bp, Homo sapiens
ttggctgattgcaacctcctcctcctgggttcaagcaatt

SEQ ID NO: 62601 - DNA, 40 bp, Homo sapiens
aattgcttgaacccaggaggaggaggttgcaatcagccaa

SEQ ID NO: 62602 - DNA, 40 bp, Homo sapiens
tggctgattgcaacctcctcctcctgggttcaagcaattc

SEQ ID NO: 62603 - DNA, 40 bp, Homo sapiens
gaattgcttgaacccaggaggaggaggttgcaatcagcca

SEQ ID NO: 62604 - DNA, 40 bp, Homo sapiens
ggctgattgcaacctcctcctcctgggttcaagcaattct

SEQ ID NO: 62605 - DNA, 40 bp, Homo sapiens
agaattgcttgaacccaggaggaggaggttgcaatcagcc

SEQ ID NO: 62606 - DNA, 40 bp, Homo sapiens
gctgattgcaacctcctcctcctgggttcaagcaattctt

SEQ ID NO: 62607 - DNA, 40 bp, Homo sapiens
aagaattgcttgaacccaggaggaggaggttgcaatcagc

SEQ ID NO: 62608 - DNA, 40 bp, Homo sapiens
ctgattgcaacctcctcctcctgggttcaagcaattcttg

SEQ ID NO: 62609 - DNA, 40 bp, Homo sapiens
caagaattgcttgaacccaggaggaggaggttgcaatcag

SEQ ID NO: 62610 - DNA, 40 bp, Homo sapiens
tgattgcaacctcctcctcctgggttcaagcaattcttgt

SEQ ID NO: 62611 - DNA, 40 bp, Homo sapiens
acaagaattgcttgaacccaggaggaggaggttgcaatca

SEQ ID NO: 62612 - DNA, 40 bp, Homo sapiens
gattgcaacctcctcctcctgggttcaagcaattcttgtg

SEQ ID NO: 62613 - DNA, 40 bp, Homo sapiens
cacaagaattgcttgaacccaggaggaggaggttgcaatc

SEQ ID NO: 62614 - DNA, 40 bp, Homo sapiens
attgcaacctcctcctcctgggttcaagcaattcttgtgc

SEQ ID NO: 62615 - DNA, 40 bp, Homo sapiens
gcacaagaattgcttgaacccaggaggaggaggttgcaat

SEQ ID NO: 62616 - DNA, 40 bp, Homo sapiens
ttgcaacctcctcctcctgggttcaagcaattcttgtgcc

SEQ ID NO: 62617 - DNA, 40 bp, Homo sapiens
ggcacaagaattgcttgaacccaggaggaggaggttgcaa

SEQ ID NO: 62618 - DNA, 40 bp, Homo sapiens
tgcaacctcctcctcctgggttcaagcaattcttgtgcct

SEQ ID NO: 62619 - DNA, 40 bp, Homo sapiens
aggcacaagaattgcttgaacccaggaggaggaggttgca

SEQ ID NO: 62620 - DNA, 40 bp, Homo sapiens
gcaacctcctcctcctgggttcaagcaattcttgtgcctc

SEQ ID NO: 62621 - DNA, 40 bp, Homo sapiens
gaggcacaagaattgcttgaacccaggaggaggaggttgc

SEQ ID NO: 62622 - DNA, 40 bp, Homo sapiens
caacctcctcctcctgggttcaagcaattcttgtgcctca

SEQ ID NO: 62623 - DNA, 40 bp, Homo sapiens
tgaggcacaagaattgcttgaacccaggaggaggaggttg

SEQ ID NO: 62624 - DNA, 40 bp, Homo sapiens
aacctcctcctcctgggttcaagcaattcttgtgcctcag

SEQ ID NO: 62625 - DNA, 40 bp, Homo sapiens
ctgaggcacaagaattgcttgaacccaggaggaggaggtt

SEQ ID NO: 62626 - DNA, 40 bp, Homo sapiens
acctcctcctcctgggttcaagcaattcttgtgcctcagc

SEQ ID NO: 62627 - DNA, 40 bp, Homo sapiens
gctgaggcacaagaattgcttgaacccaggaggaggaggt

SEQ ID NO: 62628 - DNA, 40 bp, Homo sapiens
cctcctcctcctgggttcaagcaattcttgtgcctcagcc

SEQ ID NO: 62629 - DNA, 40 bp, Homo sapiens
ggctgaggcacaagaattgcttgaacccaggaggaggagg

SEQ ID NO: 62630 - DNA, 40 bp, Homo sapiens
ctcctcctcctgggttcaagcaattcttgtgcctcagcct

SEQ ID NO: 62631 - DNA, 40 bp, Homo sapiens
aggctgaggcacaagaattgcttgaacccaggaggaggag

SEQ ID NO: 62632 - DNA, 40 bp, Homo sapiens
tcctcctcctgggttcaagcaattcttgtgcctcagcctc

SEQ ID NO: 62633 - DNA, 40 bp, Homo sapiens
gaggctgaggcacaagaattgcttgaacccaggaggagga

SEQ ID NO: 62634 - DNA, 40 bp, Homo sapiens
cctcctcctgggttcaagcaattcttgtgcctcagcctcc

SEQ ID NO: 62635 - DNA, 40 bp, Homo sapiens
ggaggctgaggcacaagaattgcttgaacccaggaggagg

SEQ ID NO: 62636 - DNA, 40 bp, Homo sapiens
ctcctcctgggttcaagcaattcttgtgcctcagcctccc

SEQ ID NO: 62637 - DNA, 40 bp, Homo sapiens
gggaggctgaggcacaagaattgcttgaacccaggaggag

SEQ ID NO: 62638 - DNA, 40 bp, Homo sapiens
tcctcctgggttcaagcaattcttgtgcctcagcctcccg

SEQ ID NO: 62639 - DNA, 40 bp, Homo sapiens
cgggaggctgaggcacaagaattgcttgaacccaggagga

SEQ ID NO: 62640 - DNA, 40 bp, Homo sapiens
cctcctgggttcaagcaattcttgtgcctcagcctcccga

SEQ ID NO: 62641 - DNA, 40 bp, Homo sapiens
tcgggaggctgaggcacaagaattgcttgaacccaggagg

SEQ ID NO: 62642 - DNA, 40 bp, Homo sapiens
ctcctgggttcaagcaattcttgtgcctcagcctcccgag

SEQ ID NO: 62643 - DNA, 40 bp, Homo sapiens
ctcgggaggctgaggcacaagaattgcttgaacccaggag

SEQ ID NO: 62644 - DNA, 40 bp, Homo sapiens
tcctgggttcaagcaattcttgtgcctcagcctcccgagc

SEQ ID NO: 62645 - DNA, 40 bp, Homo sapiens
gctcgggaggctgaggcacaagaattgcttgaacccagga

SEQ ID NO: 62646 - DNA, 40 bp, Homo sapiens
cctgggttcaagcaattcttgtgcctcagcctcccgagca

SEQ ID NO: 62647 - DNA, 40 bp, Homo sapiens
tgctcgggaggctgaggcacaagaattgcttgaacccagg

SEQ ID NO: 62648 - DNA, 40 bp, Homo sapiens
ctgggttcaagcaattcttgtgcctcagcctcccgagcag

SEQ ID NO: 62649 - DNA, 40 bp, Homo sapiens
ctgctcgggaggctgaggcacaagaattgcttgaacccag

SEQ ID NO: 62650 - DNA, 40 bp, Homo sapiens
tgggttcaagcaattcttgtgcctcagcctcccgagcagc

SEQ ID NO: 62651 - DNA, 40 bp, Homo sapiens
gctgctcgggaggctgaggcacaagaattgcttgaaccca

SEQ ID NO: 62652 - DNA, 40 bp, Homo sapiens
gggttcaagcaattcttgtgcctcagcctcccgagcagct

SEQ ID NO: 62653 - DNA, 40 bp, Homo sapiens
agctgctcgggaggctgaggcacaagaattgcttgaaccc

SEQ ID NO: 62654 - DNA, 40 bp, Homo sapiens
ggttcaagcaattcttgtgcctcagcctcccgagcagctg

SEQ ID NO: 62655 - DNA, 40 bp, Homo sapiens
cagctgctcgggaggctgaggcacaagaattgcttgaacc

SEQ ID NO: 62656 - DNA, 40 bp, Homo sapiens
gttcaagcaattcttgtgcctcagcctcccgagcagctgg

SEQ ID NO: 62657 - DNA, 40 bp, Homo sapiens
ccagctgctcgggaggctgaggcacaagaattgcttgaac

SEQ ID NO: 62658 - DNA, 40 bp, Homo sapiens
ttcaagcaattcttgtgcctcagcctcccgagcagctggg

SEQ ID NO: 62659 - DNA, 40 bp, Homo sapiens
cccagctgctcgggaggctgaggcacaagaattgcttgaa

SEQ ID NO: 62660 - DNA, 40 bp, Homo sapiens
tcaagcaattcttgtgcctcagcctcccgagcagctggga

SEQ ID NO: 62661 - DNA, 40 bp, Homo sapiens
tcccagctgctcgggaggctgaggcacaagaattgcttga

SEQ ID NO: 62662 - DNA, 40 bp, Homo sapiens
caagcaattcttgtgcctcagcctcccgagcagctgggac

SEQ ID NO: 62663 - DNA, 40 bp, Homo sapiens
gtcccagctgctcgggaggctgaggcacaagaattgcttg

SEQ ID NO: 62664 - DNA, 40 bp, Homo sapiens
aagcaattcttgtgcctcagcctcccgagcagctgggact

SEQ ID NO: 62665 - DNA, 40 bp, Homo sapiens
agtcccagctgctcgggaggctgaggcacaagaattgctt

SEQ ID NO: 62666 - DNA, 40 bp, Homo sapiens
agcaattcttgtgcctcagcctcccgagcagctgggacta

SEQ ID NO: 62667 - DNA, 40 bp, Homo sapiens
tagtcccagctgctcgggaggctgaggcacaagaattgct

SEQ ID NO: 62668 - DNA, 40 bp, Homo sapiens
gcaattcttgtgcctcagcctcccgagcagctgggactac

SEQ ID NO: 62669 - DNA, 40 bp, Homo sapiens
gtagtcccagctgctcgggaggctgaggcacaagaattgc

SEQ ID NO: 62670 - DNA, 40 bp, Homo sapiens
caattcttgtgcctcagcctcccgagcagctgggactaca

SEQ ID NO: 62671 - DNA, 40 bp, Homo sapiens
tgtagtcccagctgctcgggaggctgaggcacaagaattg

SEQ ID NO: 62672 - DNA, 40 bp, Homo sapiens
aattcttgtgcctcagcctcccgagcagctgggactacag

SEQ ID NO: 62673 - DNA, 40 bp, Homo sapiens
ctgtagtcccagctgctcgggaggctgaggcacaagaatt

SEQ ID NO: 62674 - DNA, 40 bp, Homo sapiens
attcttgtgcctcagcctcccgagcagctgggactacagg

SEQ ID NO: 62675 - DNA, 40 bp, Homo sapiens
cctgtagtcccagctgctcgggaggctgaggcacaagaat

SEQ ID NO: 62676 - DNA, 40 bp, Homo sapiens
ttcttgtgcctcagcctcccgagcagctgggactacaggc

SEQ ID NO: 62677 - DNA, 40 bp, Homo sapiens
gcctgtagtcccagctgctcgggaggctgaggcacaagaa

SEQ ID NO: 62678 - DNA, 40 bp, Homo sapiens
tcttgtgcctcagcctcccgagcagctgggactacaggca

SEQ ID NO: 62679 - DNA, 40 bp, Homo sapiens
tgcctgtagtcccagctgctcgggaggctgaggcacaaga

SEQ ID NO: 62680 - DNA, 40 bp, Homo sapiens
cttgtgcctcagcctcccgagcagctgggactacaggcac

SEQ ID NO: 62681 - DNA, 40 bp, Homo sapiens
gtgcctgtagtcccagctgctcgggaggctgaggcacaag

SEQ ID NO: 62682 - DNA, 40 bp, Homo sapiens
ttgtgcctcagcctcccgagcagctgggactacaggcacg

SEQ ID NO: 62683 - DNA, 40 bp, Homo sapiens
cgtgcctgtagtcccagctgctcgggaggctgaggcacaa

SEQ ID NO: 62684 - DNA, 40 bp, Homo sapiens
tgtgcctcagcctcccgagcagctgggactacaggcacgc

SEQ ID NO: 62685 - DNA, 40 bp, Homo sapiens
gcgtgcctgtagtcccagctgctcgggaggctgaggcaca

SEQ ID NO: 62686 - DNA, 40 bp, Homo sapiens
gtgcctcagcctcccgagcagctgggactacaggcacgca

SEQ ID NO: 62687 - DNA, 40 bp, Homo sapiens
tgcgtgcctgtagtcccagctgctcgggaggctgaggcac

SEQ ID NO: 62688 - DNA, 40 bp, Homo sapiens
tgcctcagcctcccgagcagctgggactacaggcacgcac

SEQ ID NO: 62689 - DNA, 40 bp, Homo sapiens
gtgcgtgcctgtagtcccagctgctcgggaggctgaggca

SEQ ID NO: 62690 - DNA, 40 bp, Homo sapiens
gcctcagcctcccgagcagctgggactacaggcacgcacc

SEQ ID NO: 62691 - DNA, 40 bp, Homo sapiens
ggtgcgtgcctgtagtcccagctgctcgggaggctgaggc

SEQ ID NO: 62692 - DNA, 40 bp, Homo sapiens
cctcagcctcccgagcagctgggactacaggcacgcacca

SEQ ID NO: 62693 - DNA, 40 bp, Homo sapiens
tggtgcgtgcctgtagtcccagctgctcgggaggctgagg

SEQ ID NO: 62694 - DNA, 40 bp, Homo sapiens
ctcagcctcccgagcagctgggactacaggcacgcaccac

SEQ ID NO: 62695 - DNA, 40 bp, Homo sapiens
gtggtgcgtgcctgtagtcccagctgctcgggaggctgag

SEQ ID NO: 62696 - DNA, 40 bp, Homo sapiens
tcagcctcccgagcagctgggactacaggcacgcaccacc

SEQ ID NO: 62697 - DNA, 40 bp, Homo sapiens
ggtggtgcgtgcctgtagtcccagctgctcgggaggctga

SEQ ID NO: 62698 - DNA, 40 bp, Homo sapiens
cagcctcccgagcagctgggactacaggcacgcaccacca

SEQ ID NO: 62699 - DNA, 40 bp, Homo sapiens
tggtggtgcgtgcctgtagtcccagctgctcgggaggctg

SEQ ID NO: 62700 - DNA, 40 bp, Homo sapiens
agcctcccgagcagctgggactacaggcacgcaccaccac

SEQ ID NO: 62701 - DNA, 40 bp, Homo sapiens
gtggtggtgcgtgcctgtagtcccagctgctcgggaggct

SEQ ID NO: 62702 - DNA, 40 bp, Homo sapiens
gcctcccgagcagctgggactacaggcacgcaccaccaca

SEQ ID NO: 62703 - DNA, 40 bp, Homo sapiens
tgtggtggtgcgtgcctgtagtcccagctgctcgggaggc

SEQ ID NO: 62704 - DNA, 40 bp, Homo sapiens
cctcccgagcagctgggactacaggcacgcaccaccacac

SEQ ID NO: 62705 - DNA, 40 bp, Homo sapiens
gtgtggtggtgcgtgcctgtagtcccagctgctcgggagg

SEQ ID NO: 62706 - DNA, 40 bp, Homo sapiens
ctcccgagcagctgggactacaggcacgcaccaccacacc

SEQ ID NO: 62707 - DNA, 40 bp, Homo sapiens
ggtgtggtggtgcgtgcctgtagtcccagctgctcgggag

SEQ ID NO: 62708 - DNA, 40 bp, Homo sapiens
tcccgagcagctgggactacaggcacgcaccaccacacct

SEQ ID NO: 62709 - DNA, 40 bp, Homo sapiens
aggtgtggtggtgcgtgcctgtagtcccagctgctcggga

SEQ ID NO: 62710 - DNA, 40 bp, Homo sapiens
cccgagcagctgggactacaggcacgcaccaccacacctg

SEQ ID NO: 62711 - DNA, 40 bp, Homo sapiens
caggtgtggtggtgcgtgcctgtagtcccagctgctcggg

SEQ ID NO: 62712 - DNA, 40 bp, Homo sapiens
ccgagcagctgggactacaggcacgcaccaccacacctga

SEQ ID NO: 62713 - DNA, 40 bp, Homo sapiens
tcaggtgtggtggtgcgtgcctgtagtcccagctgctcgg

SEQ ID NO: 62714 - DNA, 40 bp, Homo sapiens
cgagcagctgggactacaggcacgcaccaccacacctgac

SEQ ID NO: 62715 - DNA, 40 bp, Homo sapiens
gtcaggtgtggtggtgcgtgcctgtagtcccagctgctcg

SEQ ID NO: 62716 - DNA, 40 bp, Homo sapiens
gagcagctgggactacaggcacgcaccaccacacctgact

SEQ ID NO: 62717 - DNA, 40 bp, Homo sapiens
agtcaggtgtggtggtgcgtgcctgtagtcccagctgctc

SEQ ID NO: 62718 - DNA, 40 bp, Homo sapiens
agcagctgggactacaggcacgcaccaccacacctgactg

SEQ ID NO: 62719 - DNA, 40 bp, Homo sapiens
cagtcaggtgtggtggtgcgtgcctgtagtcccagctgct

SEQ ID NO: 62720 - DNA, 40 bp, Homo sapiens
gcagctgggactacaggcacgcaccaccacacctgactga

SEQ ID NO: 62721 - DNA, 40 bp, Homo sapiens
tcagtcaggtgtggtggtgcgtgcctgtagtcccagctgc

SEQ ID NO: 62722 - DNA, 40 bp, Homo sapiens
cagctgggactacaggcacgcaccaccacacctgactgat

SEQ ID NO: 62723 - DNA, 40 bp, Homo sapiens
atcagtcaggtgtggtggtgcgtgcctgtagtcccagctg

SEQ ID NO: 62724 - DNA, 40 bp, Homo sapiens
agctgggactacaggcacgcaccaccacacctgactgatt

SEQ ID NO: 62725 - DNA, 40 bp, Homo sapiens
aatcagtcaggtgtggtggtgcgtgcctgtagtcccagct

SEQ ID NO: 62726 - DNA, 40 bp, Homo sapiens
gctgggactacaggcacgcaccaccacacctgactgattt

SEQ ID NO: 62727 - DNA, 40 bp, Homo sapiens
aaatcagtcaggtgtggtggtgcgtgcctgtagtcccagc

SEQ ID NO: 62728 - DNA, 40 bp, Homo sapiens
ctgggactacaggcacgcaccaccacacctgactgatttt

SEQ ID NO: 62729 - DNA, 40 bp, Homo sapiens
aaaatcagtcaggtgtggtggtgcgtgcctgtagtcccag

SEQ ID NO: 62730 - DNA, 40 bp, Homo sapiens
tgggactacaggcacgcaccaccacacctgactgattttt

SEQ ID NO: 62731 - DNA, 40 bp, Homo sapiens
aaaaatcagtcaggtgtggtggtgcgtgcctgtagtccca

SEQ ID NO: 62732 - DNA, 40 bp, Homo sapiens
gggactacaggcacgcaccaccacacctgactgatttttg

SEQ ID NO: 62733 - DNA, 40 bp, Homo sapiens
caaaaatcagtcaggtgtggtggtgcgtgcctgtagtccc

SEQ ID NO: 62734 - DNA, 40 bp, Homo sapiens
ggactacaggcacgcaccaccacacctgactgatttttgt

SEQ ID NO: 62735 - DNA, 40 bp, Homo sapiens
acaaaaatcagtcaggtgtggtggtgcgtgcctgtagtcc

SEQ ID NO: 62736 - DNA, 40 bp, Homo sapiens
gactacaggcacgcaccaccacacctgactgatttttgta

SEQ ID NO: 62737 - DNA, 40 bp, Homo sapiens
tacaaaaatcagtcaggtgtggtggtgcgtgcctgtagtc

SEQ ID NO: 62738 - DNA, 40 bp, Homo sapiens
actacaggcacgcaccaccacacctgactgatttttgtat

SEQ ID NO: 62739 - DNA, 40 bp, Homo sapiens
atacaaaaatcagtcaggtgtggtggtgcgtgcctgtagt

SEQ ID NO: 62740 - DNA, 40 bp, Homo sapiens
ctacaggcacgcaccaccacacctgactgatttttgtatt

SEQ ID NO: 62741 - DNA, 40 bp, Homo sapiens
aatacaaaaatcagtcaggtgtggtggtgcgtgcctgtag

SEQ ID NO: 62742 - DNA, 40 bp, Homo sapiens
tacaggcacgcaccaccacacctgactgatttttgtattt

SEQ ID NO: 62743 - DNA, 40 bp, Homo sapiens
aaatacaaaaatcagtcaggtgtggtggtgcgtgcctgta

SEQ ID NO: 62744 - DNA, 40 bp, Homo sapiens
acaggcacgcaccaccacacctgactgatttttgtatttt

SEQ ID NO: 62745 - DNA, 40 bp, Homo sapiens
aaaatacaaaaatcagtcaggtgtggtggtgcgtgcctgt

SEQ ID NO: 62746 - DNA, 40 bp, Homo sapiens
caggcacgcaccaccacacctgactgatttttgtattttt

SEQ ID NO: 62747 - DNA, 40 bp, Homo sapiens
aaaaatacaaaaatcagtcaggtgtggtggtgcgtgcctg

SEQ ID NO: 62748 - DNA, 40 bp, Homo sapiens
aggcacgcaccaccacacctgactgatttttgtattttta

SEQ ID NO: 62749 - DNA, 40 bp, Homo sapiens
taaaaatacaaaaatcagtcaggtgtggtggtgcgtgcct

SEQ ID NO: 62750 - DNA, 40 bp, Homo sapiens
ggcacgcaccaccacacctgactgatttttgtatttttag

SEQ ID NO: 62751 - DNA, 40 bp, Homo sapiens
ctaaaaatacaaaaatcagtcaggtgtggtggtgcgtgcc

SEQ ID NO: 62752 - DNA, 40 bp, Homo sapiens
gcacgcaccaccacacctgactgatttttgtatttttagt

SEQ ID NO: 62753 - DNA, 40 bp, Homo sapiens
actaaaaatacaaaaatcagtcaggtgtggtggtgcgtgc

SEQ ID NO: 62754 - DNA, 40 bp, Homo sapiens
cacgcaccaccacacctgactgatttttgtatttttagta

SEQ ID NO: 62755 - DNA, 40 bp, Homo sapiens
tactaaaaatacaaaaatcagtcaggtgtggtggtgcgtg

SEQ ID NO: 62756 - DNA, 40 bp, Homo sapiens
acgcaccaccacacctgactgatttttgtatttttagtag

SEQ ID NO: 62757 - DNA, 40 bp, Homo sapiens
ctactaaaaatacaaaaatcagtcaggtgtggtggtgcgt

SEQ ID NO: 62758 - DNA, 40 bp, Homo sapiens
cgcaccaccacacctgactgatttttgtatttttagtaga

SEQ ID NO: 62759 - DNA, 40 bp, Homo sapiens
tctactaaaaatacaaaaatcagtcaggtgtggtggtgcg

SEQ ID NO: 62760 - DNA, 40 bp, Homo sapiens
gcaccaccacacctgactgatttttgtatttttagtagag

SEQ ID NO: 62761 - DNA, 40 bp, Homo sapiens
ctctactaaaaatacaaaaatcagtcaggtgtggtggtgc

SEQ ID NO: 62762 - DNA, 40 bp, Homo sapiens
caccaccacacctgactgatttttgtatttttagtagaga

SEQ ID NO: 62763 - DNA, 40 bp, Homo sapiens
tctctactaaaaatacaaaaatcagtcaggtgtggtggtg

SEQ ID NO: 62764 - DNA, 40 bp, Homo sapiens
accaccacacctgactgatttttgtatttttagtagagac

SEQ ID NO: 62765 - DNA, 40 bp, Homo sapiens
gtctctactaaaaatacaaaaatcagtcaggtgtggtggt

SEQ ID NO: 62766 - DNA, 40 bp, Homo sapiens
ccaccacacctgactgatttttgtatttttagtagagaca

SEQ ID NO: 62767 - DNA, 40 bp, Homo sapiens
tgtctctactaaaaatacaaaaatcagtcaggtgtggtgg

SEQ ID NO: 62768 - DNA, 40 bp, Homo sapiens
caccacacctgactgatttttgtatttttagtagagacag

SEQ ID NO: 62769 - DNA, 40 bp, Homo sapiens
ctgtctctactaaaaatacaaaaatcagtcaggtgtggtg

SEQ ID NO: 62770 - DNA, 40 bp, Homo sapiens
accacacctgactgatttttgtatttttagtagagacagg

SEQ ID NO: 62771 - DNA, 40 bp, Homo sapiens
cctgtctctactaaaaatacaaaaatcagtcaggtgtggt

SEQ ID NO: 62772 - DNA, 40 bp, Homo sapiens
ccacacctgactgatttttgtatttttagtagagacaggg

SEQ ID NO: 62773 - DNA, 40 bp, Homo sapiens
ccctgtctctactaaaaatacaaaaatcagtcaggtgtgg

SEQ ID NO: 62774 - DNA, 40 bp, Homo sapiens
cacacctgactgatttttgtatttttagtagagacagggt

SEQ ID NO: 62775 - DNA, 40 bp, Homo sapiens
accctgtctctactaaaaatacaaaaatcagtcaggtgtg

SEQ ID NO: 62776 - DNA, 40 bp, Homo sapiens
acacctgactgatttttgtatttttagtagagacagggtt

SEQ ID NO: 62777 - DNA, 40 bp, Homo sapiens
aaccctgtctctactaaaaatacaaaaatcagtcaggtgt

SEQ ID NO: 62778 - DNA, 40 bp, Homo sapiens
cacctgactgatttttgtatttttagtagagacagggttt

SEQ ID NO: 62779 - DNA, 40 bp, Homo sapiens
aaaccctgtctctactaaaaatacaaaaatcagtcaggtg

SEQ ID NO: 62780 - DNA, 40 bp, Homo sapiens
acctgactgatttttgtatttttagtagagacagggtttc

SEQ ID NO: 62781 - DNA, 40 bp, Homo sapiens
gaaaccctgtctctactaaaaatacaaaaatcagtcaggt

SEQ ID NO: 62782 - DNA, 40 bp, Homo sapiens
cctgactgatttttgtatttttagtagagacagggtttcg

SEQ ID NO: 62783 - DNA, 40 bp, Homo sapiens
cgaaaccctgtctctactaaaaatacaaaaatcagtcagg

SEQ ID NO: 62784 - DNA, 40 bp, Homo sapiens
ctgactgatttttgtatttttagtagagacagggtttcgc

SEQ ID NO: 62785 - DNA, 40 bp, Homo sapiens
gcgaaaccctgtctctactaaaaatacaaaaatcagtcag

SEQ ID NO: 62786 - DNA, 40 bp, Homo sapiens
tgactgatttttgtatttttagtagagacagggtttcgcc

SEQ ID NO: 62787 - DNA, 40 bp, Homo sapiens
ggcgaaaccctgtctctactaaaaatacaaaaatcagtca

SEQ ID NO: 62788 - DNA, 40 bp, Homo sapiens
gactgatttttgtatttttagtagagacagggtttcgcca

SEQ ID NO: 62789 - DNA, 40 bp, Homo sapiens
tggcgaaaccctgtctctactaaaaatacaaaaatcagtc

SEQ ID NO: 62790 - DNA, 40 bp, Homo sapiens
actgatttttgtatttttagtagagacagggtttcgccat

SEQ ID NO: 62791 - DNA, 40 bp, Homo sapiens
atggcgaaaccctgtctctactaaaaatacaaaaatcagt

SEQ ID NO: 62792 - DNA, 40 bp, Homo sapiens
ctgatttttgtatttttagtagagacagggtttcgccatg

SEQ ID NO: 62793 - DNA, 40 bp, Homo sapiens
catggcgaaaccctgtctctactaaaaatacaaaaatcag

SEQ ID NO: 62794 - DNA, 40 bp, Homo sapiens
tgatttttgtatttttagtagagacagggtttcgccatgt

SEQ ID NO: 62795 - DNA, 40 bp, Homo sapiens
acatggcgaaaccctgtctctactaaaaatacaaaaatca

SEQ ID NO: 62796 - DNA, 40 bp, Homo sapiens
gatttttgtatttttagtagagacagggtttcgccatgtt

SEQ ID NO: 62797 - DNA, 40 bp, Homo sapiens
aacatggcgaaaccctgtctctactaaaaatacaaaaatc

SEQ ID NO: 62798 - DNA, 40 bp, Homo sapiens
atttttgtatttttagtagagacagggtttcgccatgttg

SEQ ID NO: 62799 - DNA, 40 bp, Homo sapiens
caacatggcgaaaccctgtctctactaaaaatacaaaaat

SEQ ID NO: 62800 - DNA, 40 bp, Homo sapiens
tttttgtatttttagtagagacagggtttcgccatgttgg

SEQ ID NO: 62801 - DNA, 40 bp, Homo sapiens
ccaacatggcgaaaccctgtctctactaaaaatacaaaaa

SEQ ID NO: 62802 - DNA, 40 bp, Homo sapiens
ttttgtatttttagtagagacagggtttcgccatgttggc

SEQ ID NO: 62803 - DNA, 40 bp, Homo sapiens
gccaacatggcgaaaccctgtctctactaaaaatacaaaa

SEQ ID NO: 62804 - DNA, 40 bp, Homo sapiens
tttgtatttttagtagagacagggtttcgccatgttggcc

SEQ ID NO: 62805 - DNA, 40 bp, Homo sapiens
ggccaacatggcgaaaccctgtctctactaaaaatacaaa

SEQ ID NO: 62806 - DNA, 40 bp, Homo sapiens
ttgtatttttagtagagacagggtttcgccatgttggcca

SEQ ID NO: 62807 - DNA, 40 bp, Homo sapiens
tggccaacatggcgaaaccctgtctctactaaaaatacaa

SEQ ID NO: 62808 - DNA, 40 bp, Homo sapiens
tgtatttttagtagagacagggtttcgccatgttggccag

SEQ ID NO: 62809 - DNA, 40 bp, Homo sapiens
ctggccaacatggcgaaaccctgtctctactaaaaataca

SEQ ID NO: 62810 - DNA, 40 bp, Homo sapiens
gtatttttagtagagacagggtttcgccatgttggccagg

SEQ ID NO: 62811 - DNA, 40 bp, Homo sapiens
cctggccaacatggcgaaaccctgtctctactaaaaatac

SEQ ID NO: 62812 - DNA, 40 bp, Homo sapiens
tatttttagtagagacagggtttcgccatgttggccaggc

SEQ ID NO: 62813 - DNA, 40 bp, Homo sapiens
gcctggccaacatggcgaaaccctgtctctactaaaaata

SEQ ID NO: 62814 - DNA, 40 bp, Homo sapiens
atttttagtagagacagggtttcgccatgttggccaggct

SEQ ID NO: 62815 - DNA, 40 bp, Homo sapiens
agcctggccaacatggcgaaaccctgtctctactaaaaat

SEQ ID NO: 62816 - DNA, 40 bp, Homo sapiens
tttttagtagagacagggtttcgccatgttggccaggctg

SEQ ID NO: 62817 - DNA, 40 bp, Homo sapiens
cagcctggccaacatggcgaaaccctgtctctactaaaaa

SEQ ID NO: 62818 - DNA, 40 bp, Homo sapiens
ttttagtagagacagggtttcgccatgttggccaggctgg

SEQ ID NO: 62819 - DNA, 40 bp, Homo sapiens
ccagcctggccaacatggcgaaaccctgtctctactaaaa

SEQ ID NO: 62820 - DNA, 40 bp, Homo sapiens
tttagtagagacagggtttcgccatgttggccaggctggt

SEQ ID NO: 62821 - DNA, 40 bp, Homo sapiens
accagcctggccaacatggcgaaaccctgtctctactaaa

SEQ ID NO: 62822 - DNA, 40 bp, Homo sapiens
ttagtagagacagggtttcgccatgttggccaggctggtc

SEQ ID NO: 62823 - DNA, 40 bp, Homo sapiens
gaccagcctggccaacatggcgaaaccctgtctctactaa

SEQ ID NO: 62824 - DNA, 40 bp, Homo sapiens
tagtagagacagggtttcgccatgttggccaggctggtct

SEQ ID NO: 62825 - DNA, 40 bp, Homo sapiens
agaccagcctggccaacatggcgaaaccctgtctctacta

SEQ ID NO: 62826 - DNA, 40 bp, Homo sapiens
agtagagacagggtttcgccatgttggccaggctggtctt

SEQ ID NO: 62827 - DNA, 40 bp, Homo sapiens
aagaccagcctggccaacatggcgaaaccctgtctctact

SEQ ID NO: 62828 - DNA, 40 bp, Homo sapiens
gtagagacagggtttcgccatgttggccaggctggtcttg

SEQ ID NO: 62829 - DNA, 40 bp, Homo sapiens
caagaccagcctggccaacatggcgaaaccctgtctctac

SEQ ID NO: 62830 - DNA, 40 bp, Homo sapiens
tagagacagggtttcgccatgttggccaggctggtcttga

SEQ ID NO: 62831 - DNA, 40 bp, Homo sapiens
tcaagaccagcctggccaacatggcgaaaccctgtctcta

SEQ ID NO: 62832 - DNA, 40 bp, Homo sapiens
agagacagggtttcgccatgttggccaggctggtcttgaa

SEQ ID NO: 62833 - DNA, 40 bp, Homo sapiens
ttcaagaccagcctggccaacatggcgaaaccctgtctct

SEQ ID NO: 62834 - DNA, 40 bp, Homo sapiens
gagacagggtttcgccatgttggccaggctggtcttgaac

SEQ ID NO: 62835 - DNA, 40 bp, Homo sapiens
gttcaagaccagcctggccaacatggcgaaaccctgtctc

SEQ ID NO: 62836 - DNA, 40 bp, Homo sapiens
agacagggtttcgccatgttggccaggctggtcttgaact

SEQ ID NO: 62837 - DNA, 40 bp, Homo sapiens
agttcaagaccagcctggccaacatggcgaaaccctgtct

SEQ ID NO: 62838 - DNA, 40 bp, Homo sapiens
gacagggtttcgccatgttggccaggctggtcttgaactc

SEQ ID NO: 62839 - DNA, 40 bp, Homo sapiens
gagttcaagaccagcctggccaacatggcgaaaccctgtc

SEQ ID NO: 62840 - DNA, 40 bp, Homo sapiens
acagggtttcgccatgttggccaggctggtcttgaactcc

SEQ ID NO: 62841 - DNA, 40 bp, Homo sapiens
ggagttcaagaccagcctggccaacatggcgaaaccctgt

SEQ ID NO: 62842 - DNA, 40 bp, Homo sapiens
cagggtttcgccatgttggccaggctggtcttgaactcct

SEQ ID NO: 62843 - DNA, 40 bp, Homo sapiens
aggagttcaagaccagcctggccaacatggcgaaaccctg

SEQ ID NO: 62844 - DNA, 40 bp, Homo sapiens
agggtttcgccatgttggccaggctggtcttgaactcctg

SEQ ID NO: 62845 - DNA, 40 bp, Homo sapiens
caggagttcaagaccagcctggccaacatggcgaaaccct

SEQ ID NO: 62846 - DNA, 40 bp, Homo sapiens
gggtttcgccatgttggccaggctggtcttgaactcctgg

SEQ ID NO: 62847 - DNA, 40 bp, Homo sapiens
ccaggagttcaagaccagcctggccaacatggcgaaaccc

SEQ ID NO: 62848 - DNA, 40 bp, Homo sapiens
ggtttcgccatgttggccaggctggtcttgaactcctggc

SEQ ID NO: 62849 - DNA, 40 bp, Homo sapiens
gccaggagttcaagaccagcctggccaacatggcgaaacc

SEQ ID NO: 62850 - DNA, 40 bp, Homo sapiens
gtttcgccatgttggccaggctggtcttgaactcctggca

SEQ ID NO: 62851 - DNA, 40 bp, Homo sapiens
tgccaggagttcaagaccagcctggccaacatggcgaaac

SEQ ID NO: 62852 - DNA, 40 bp, Homo sapiens
tttcgccatgttggccaggctggtcttgaactcctggcat

SEQ ID NO: 62853 - DNA, 40 bp, Homo sapiens
atgccaggagttcaagaccagcctggccaacatggcgaaa

SEQ ID NO: 62854 - DNA, 40 bp, Homo sapiens
ttcgccatgttggccaggctggtcttgaactcctggcatc

SEQ ID NO: 62855 - DNA, 40 bp, Homo sapiens
gatgccaggagttcaagaccagcctggccaacatggcgaa

SEQ ID NO: 62856 - DNA, 40 bp, Homo sapiens
tcgccatgttggccaggctggtcttgaactcctggcatca

SEQ ID NO: 62857 - DNA, 40 bp, Homo sapiens
tgatgccaggagttcaagaccagcctggccaacatggcga

SEQ ID NO: 62858 - DNA, 40 bp, Homo sapiens
cgccatgttggccaggctggtcttgaactcctggcatcaa

SEQ ID NO: 62859 - DNA, 40 bp, Homo sapiens
ttgatgccaggagttcaagaccagcctggccaacatggcg

SEQ ID NO: 62860 - DNA, 40 bp, Homo sapiens
gccatgttggccaggctggtcttgaactcctggcatcaag

SEQ ID NO: 62861 - DNA, 40 bp, Homo sapiens
cttgatgccaggagttcaagaccagcctggccaacatggc

SEQ ID NO: 62862 - DNA, 40 bp, Homo sapiens
ccatgttggccaggctggtcttgaactcctggcatcaagt

SEQ ID NO: 62863 - DNA, 40 bp, Homo sapiens
acttgatgccaggagttcaagaccagcctggccaacatgg

SEQ ID NO: 62864 - DNA, 40 bp, Homo sapiens
catgttggccaggctggtcttgaactcctggcatcaagtg

SEQ ID NO: 62865 - DNA, 40 bp, Homo sapiens
cacttgatgccaggagttcaagaccagcctggccaacatg

SEQ ID NO: 62866 - DNA, 40 bp, Homo sapiens
atgttggccaggctggtcttgaactcctggcatcaagtga

SEQ ID NO: 62867 - DNA, 40 bp, Homo sapiens
tcacttgatgccaggagttcaagaccagcctggccaacat

SEQ ID NO: 62868 - DNA, 40 bp, Homo sapiens
tgttggccaggctggtcttgaactcctggcatcaagtgat

SEQ ID NO: 62869 - DNA, 40 bp, Homo sapiens
atcacttgatgccaggagttcaagaccagcctggccaaca

SEQ ID NO: 62870 - DNA, 40 bp, Homo sapiens
gttggccaggctggtcttgaactcctggcatcaagtgatc

SEQ ID NO: 62871 - DNA, 40 bp, Homo sapiens
gatcacttgatgccaggagttcaagaccagcctggccaac

SEQ ID NO: 62872 - DNA, 40 bp, Homo sapiens
ttggccaggctggtcttgaactcctggcatcaagtgatcc

SEQ ID NO: 62873 - DNA, 40 bp, Homo sapiens
ggatcacttgatgccaggagttcaagaccagcctggccaa

SEQ ID NO: 62874 - DNA, 40 bp, Homo sapiens
tggccaggctggtcttgaactcctggcatcaagtgatcct

SEQ ID NO: 62875 - DNA, 40 bp, Homo sapiens
aggatcacttgatgccaggagttcaagaccagcctggcca

SEQ ID NO: 62876 - DNA, 40 bp, Homo sapiens
ggccaggctggtcttgaactcctggcatcaagtgatcctc

SEQ ID NO: 62877 - DNA, 40 bp, Homo sapiens
gaggatcacttgatgccaggagttcaagaccagcctggcc

SEQ ID NO: 62878 - DNA, 40 bp, Homo sapiens
gccaggctggtcttgaactcctggcatcaagtgatcctcc

SEQ ID NO: 62879 - DNA, 40 bp, Homo sapiens
ggaggatcacttgatgccaggagttcaagaccagcctggc

SEQ ID NO: 62880 - DNA, 40 bp, Homo sapiens
ccaggctggtcttgaactcctggcatcaagtgatcctccc

SEQ ID NO: 62881 - DNA, 40 bp, Homo sapiens
gggaggatcacttgatgccaggagttcaagaccagcctgg

SEQ ID NO: 62882 - DNA, 40 bp, Homo sapiens
caggctggtcttgaactcctggcatcaagtgatcctccca

SEQ ID NO: 62883 - DNA, 40 bp, Homo sapiens
tgggaggatcacttgatgccaggagttcaagaccagcctg

SEQ ID NO: 62884 - DNA, 40 bp, Homo sapiens
aggctggtcttgaactcctggcatcaagtgatcctcccat

SEQ ID NO: 62885 - DNA, 40 bp, Homo sapiens
atgggaggatcacttgatgccaggagttcaagaccagcct

SEQ ID NO: 62886 - DNA, 40 bp, Homo sapiens
ggctggtcttgaactcctggcatcaagtgatcctcccatc

SEQ ID NO: 62887 - DNA, 40 bp, Homo sapiens
gatgggaggatcacttgatgccaggagttcaagaccagcc

SEQ ID NO: 62888 - DNA, 40 bp, Homo sapiens
gctggtcttgaactcctggcatcaagtgatcctcccatct

SEQ ID NO: 62889 - DNA, 40 bp, Homo sapiens
agatgggaggatcacttgatgccaggagttcaagaccagc

SEQ ID NO: 62890 - DNA, 40 bp, Homo sapiens
ctggtcttgaactcctggcatcaagtgatcctcccatctg

SEQ ID NO: 62891 - DNA, 40 bp, Homo sapiens
cagatgggaggatcacttgatgccaggagttcaagaccag

SEQ ID NO: 62892 - DNA, 40 bp, Homo sapiens
tggtcttgaactcctggcatcaagtgatcctcccatctga

SEQ ID NO: 62893 - DNA, 40 bp, Homo sapiens
tcagatgggaggatcacttgatgccaggagttcaagacca

SEQ ID NO: 62894 - DNA, 40 bp, Homo sapiens
ggtcttgaactcctggcatcaagtgatcctcccatctgag

SEQ ID NO: 62895 - DNA, 40 bp, Homo sapiens
ctcagatgggaggatcacttgatgccaggagttcaagacc

SEQ ID NO: 62896 - DNA, 40 bp, Homo sapiens
gtcttgaactcctggcatcaagtgatcctcccatctgagc

SEQ ID NO: 62897 - DNA, 40 bp, Homo sapiens
gctcagatgggaggatcacttgatgccaggagttcaagac

SEQ ID NO: 62898 - DNA, 40 bp, Homo sapiens
tcttgaactcctggcatcaagtgatcctcccatctgagcc

SEQ ID NO: 62899 - DNA, 40 bp, Homo sapiens
ggctcagatgggaggatcacttgatgccaggagttcaaga

SEQ ID NO: 62900 - DNA, 40 bp, Homo sapiens
cttgaactcctggcatcaagtgatcctcccatctgagcct

SEQ ID NO: 62901 - DNA, 40 bp, Homo sapiens
aggctcagatgggaggatcacttgatgccaggagttcaag

SEQ ID NO: 62902 - DNA, 40 bp, Homo sapiens
ttgaactcctggcatcaagtgatcctcccatctgagcctc

SEQ ID NO: 62903 - DNA, 40 bp, Homo sapiens
gaggctcagatgggaggatcacttgatgccaggagttcaa

SEQ ID NO: 62904 - DNA, 40 bp, Homo sapiens
tgaactcctggcatcaagtgatcctcccatctgagcctcc

SEQ ID NO: 62905 - DNA, 40 bp, Homo sapiens
ggaggctcagatgggaggatcacttgatgccaggagttca

SEQ ID NO: 62906 - DNA, 40 bp, Homo sapiens
gaactcctggcatcaagtgatcctcccatctgagcctccc

SEQ ID NO: 62907 - DNA, 40 bp, Homo sapiens
gggaggctcagatgggaggatcacttgatgccaggagttc

SEQ ID NO: 62908 - DNA, 40 bp, Homo sapiens
aactcctggcatcaagtgatcctcccatctgagcctccca

SEQ ID NO: 62909 - DNA, 40 bp, Homo sapiens
tgggaggctcagatgggaggatcacttgatgccaggagtt

SEQ ID NO: 62910 - DNA, 40 bp, Homo sapiens
actcctggcatcaagtgatcctcccatctgagcctcccag

SEQ ID NO: 62911 - DNA, 40 bp, Homo sapiens
ctgggaggctcagatgggaggatcacttgatgccaggagt

SEQ ID NO: 62912 - DNA, 40 bp, Homo sapiens
ctcctggcatcaagtgatcctcccatctgagcctcccagt

SEQ ID NO: 62913 - DNA, 40 bp, Homo sapiens
actgggaggctcagatgggaggatcacttgatgccaggag

SEQ ID NO: 62914 - DNA, 40 bp, Homo sapiens
tcctggcatcaagtgatcctcccatctgagcctcccagtg

SEQ ID NO: 62915 - DNA, 40 bp, Homo sapiens
cactgggaggctcagatgggaggatcacttgatgccagga

SEQ ID NO: 62916 - DNA, 40 bp, Homo sapiens
cctggcatcaagtgatcctcccatctgagcctcccagtgt

SEQ ID NO: 62917 - DNA, 40 bp, Homo sapiens
acactgggaggctcagatgggaggatcacttgatgccagg

SEQ ID NO: 62918 - DNA, 40 bp, Homo sapiens
ctggcatcaagtgatcctcccatctgagcctcccagtgtg

SEQ ID NO: 62919 - DNA, 40 bp, Homo sapiens
cacactgggaggctcagatgggaggatcacttgatgccag

SEQ ID NO: 62920 - DNA, 40 bp, Homo sapiens
tggcatcaagtgatcctcccatctgagcctcccagtgtgc

SEQ ID NO: 62921 - DNA, 40 bp, Homo sapiens
gcacactgggaggctcagatgggaggatcacttgatgcca

SEQ ID NO: 62922 - DNA, 40 bp, Homo sapiens
ggcatcaagtgatcctcccatctgagcctcccagtgtgct

SEQ ID NO: 62923 - DNA, 40 bp, Homo sapiens
agcacactgggaggctcagatgggaggatcacttgatgcc

SEQ ID NO: 62924 - DNA, 40 bp, Homo sapiens
gcatcaagtgatcctcccatctgagcctcccagtgtgctg

SEQ ID NO: 62925 - DNA, 40 bp, Homo sapiens
cagcacactgggaggctcagatgggaggatcacttgatgc

SEQ ID NO: 62926 - DNA, 40 bp, Homo sapiens
catcaagtgatcctcccatctgagcctcccagtgtgctgg

SEQ ID NO: 62927 - DNA, 40 bp, Homo sapiens
ccagcacactgggaggctcagatgggaggatcacttgatg

SEQ ID NO: 62928 - DNA, 40 bp, Homo sapiens
atcaagtgatcctcccatctgagcctcccagtgtgctggg

SEQ ID NO: 62929 - DNA, 40 bp, Homo sapiens
cccagcacactgggaggctcagatgggaggatcacttgat

SEQ ID NO: 62930 - DNA, 40 bp, Homo sapiens
tcaagtgatcctcccatctgagcctcccagtgtgctggga

SEQ ID NO: 62931 - DNA, 40 bp, Homo sapiens
tcccagcacactgggaggctcagatgggaggatcacttga

SEQ ID NO: 62932 - DNA, 40 bp, Homo sapiens
caagtgatcctcccatctgagcctcccagtgtgctgggat

SEQ ID NO: 62933 - DNA, 40 bp, Homo sapiens
atcccagcacactgggaggctcagatgggaggatcacttg

SEQ ID NO: 62934 - DNA, 40 bp, Homo sapiens
aagtgatcctcccatctgagcctcccagtgtgctgggatt

SEQ ID NO: 62935 - DNA, 40 bp, Homo sapiens
aatcccagcacactgggaggctcagatgggaggatcactt

SEQ ID NO: 62936 - DNA, 40 bp, Homo sapiens
agtgatcctcccatctgagcctcccagtgtgctgggatta

SEQ ID NO: 62937 - DNA, 40 bp, Homo sapiens
taatcccagcacactgggaggctcagatgggaggatcact

SEQ ID NO: 62938 - DNA, 40 bp, Homo sapiens
gtgatcctcccatctgagcctcccagtgtgctgggattac

SEQ ID NO: 62939 - DNA, 40 bp, Homo sapiens
gtaatcccagcacactgggaggctcagatgggaggatcac

SEQ ID NO: 62940 - DNA, 40 bp, Homo sapiens
tgatcctcccatctgagcctcccagtgtgctgggattaca

SEQ ID NO: 62941 - DNA, 40 bp, Homo sapiens
tgtaatcccagcacactgggaggctcagatgggaggatca

SEQ ID NO: 62942 - DNA, 40 bp, Homo sapiens
gatcctcccatctgagcctcccagtgtgctgggattacag

SEQ ID NO: 62943 - DNA, 40 bp, Homo sapiens
ctgtaatcccagcacactgggaggctcagatgggaggatc

SEQ ID NO: 62944 - DNA, 40 bp, Homo sapiens
atcctcccatctgagcctcccagtgtgctgggattacaga

SEQ ID NO: 62945 - DNA, 40 bp, Homo sapiens
tctgtaatcccagcacactgggaggctcagatgggaggat

SEQ ID NO: 62946 - DNA, 40 bp, Homo sapiens
tcctcccatctgagcctcccagtgtgctgggattacagac

SEQ ID NO: 62947 - DNA, 40 bp, Homo sapiens
gtctgtaatcccagcacactgggaggctcagatgggagga

SEQ ID NO: 62948 - DNA, 40 bp, Homo sapiens
cctcccatctgagcctcccagtgtgctgggattacagacg

SEQ ID NO: 62949 - DNA, 40 bp, Homo sapiens
cgtctgtaatcccagcacactgggaggctcagatgggagg

SEQ ID NO: 62950 - DNA, 40 bp, Homo sapiens
ctcccatctgagcctcccagtgtgctgggattacagacgt

SEQ ID NO: 62951 - DNA, 40 bp, Homo sapiens
acgtctgtaatcccagcacactgggaggctcagatgggag

SEQ ID NO: 62952 - DNA, 40 bp, Homo sapiens
tcccatctgagcctcccagtgtgctgggattacagacgtg

SEQ ID NO: 62953 - DNA, 40 bp, Homo sapiens
cacgtctgtaatcccagcacactgggaggctcagatggga

SEQ ID NO: 62954 - DNA, 40 bp, Homo sapiens
cccatctgagcctcccagtgtgctgggattacagacgtga

SEQ ID NO: 62955 - DNA, 40 bp, Homo sapiens
tcacgtctgtaatcccagcacactgggaggctcagatggg

SEQ ID NO: 62956 - DNA, 40 bp, Homo sapiens
ccatctgagcctcccagtgtgctgggattacagacgtgag

SEQ ID NO: 62957 - DNA, 40 bp, Homo sapiens
ctcacgtctgtaatcccagcacactgggaggctcagatgg

SEQ ID NO: 62958 - DNA, 40 bp, Homo sapiens
catctgagcctcccagtgtgctgggattacagacgtgagt

SEQ ID NO: 62959 - DNA, 40 bp, Homo sapiens
actcacgtctgtaatcccagcacactgggaggctcagatg

SEQ ID NO: 62960 - DNA, 40 bp, Homo sapiens
atctgagcctcccagtgtgctgggattacagacgtgagtc

SEQ ID NO: 62961 - DNA, 40 bp, Homo sapiens
gactcacgtctgtaatcccagcacactgggaggctcagat

SEQ ID NO: 62962 - DNA, 40 bp, Homo sapiens
tctgagcctcccagtgtgctgggattacagacgtgagtca

SEQ ID NO: 62963 - DNA, 40 bp, Homo sapiens
tgactcacgtctgtaatcccagcacactgggaggctcaga

SEQ ID NO: 62964 - DNA, 40 bp, Homo sapiens
ctgagcctcccagtgtgctgggattacagacgtgagtcac

SEQ ID NO: 62965 - DNA, 40 bp, Homo sapiens
gtgactcacgtctgtaatcccagcacactgggaggctcag

SEQ ID NO: 62966 - DNA, 40 bp, Homo sapiens
tgagcctcccagtgtgctgggattacagacgtgagtcact

SEQ ID NO: 62967 - DNA, 40 bp, Homo sapiens
agtgactcacgtctgtaatcccagcacactgggaggctca

SEQ ID NO: 62968 - DNA, 40 bp, Homo sapiens
gagcctcccagtgtgctgggattacagacgtgagtcactg

SEQ ID NO: 62969 - DNA, 40 bp, Homo sapiens
cagtgactcacgtctgtaatcccagcacactgggaggctc

SEQ ID NO: 62970 - DNA, 40 bp, Homo sapiens
agcctcccagtgtgctgggattacagacgtgagtcactgt

SEQ ID NO: 62971 - DNA, 40 bp, Homo sapiens
acagtgactcacgtctgtaatcccagcacactgggaggct

SEQ ID NO: 62972 - DNA, 40 bp, Homo sapiens
gcctcccagtgtgctgggattacagacgtgagtcactgtg

SEQ ID NO: 62973 - DNA, 40 bp, Homo sapiens
cacagtgactcacgtctgtaatcccagcacactgggaggc

SEQ ID NO: 62974 - DNA, 40 bp, Homo sapiens
cctcccagtgtgctgggattacagacgtgagtcactgtgc

SEQ ID NO: 62975 - DNA, 40 bp, Homo sapiens
gcacagtgactcacgtctgtaatcccagcacactgggagg

SEQ ID NO: 62976 - DNA, 40 bp, Homo sapiens
ctcccagtgtgctgggattacagacgtgagtcactgtgcc

SEQ ID NO: 62977 - DNA, 40 bp, Homo sapiens
ggcacagtgactcacgtctgtaatcccagcacactgggag

SEQ ID NO: 62978 - DNA, 40 bp, Homo sapiens
tcccagtgtgctgggattacagacgtgagtcactgtgcct

SEQ ID NO: 62979 - DNA, 40 bp, Homo sapiens
aggcacagtgactcacgtctgtaatcccagcacactggga

SEQ ID NO: 62980 - DNA, 40 bp, Homo sapiens
cccagtgtgctgggattacagacgtgagtcactgtgcctg

SEQ ID NO: 62981 - DNA, 40 bp, Homo sapiens
caggcacagtgactcacgtctgtaatcccagcacactggg

SEQ ID NO: 62982 - DNA, 40 bp, Homo sapiens
ccagtgtgctgggattacagacgtgagtcactgtgcctgg

SEQ ID NO: 62983 - DNA, 40 bp, Homo sapiens
ccaggcacagtgactcacgtctgtaatcccagcacactgg

SEQ ID NO: 62984 - DNA, 40 bp, Homo sapiens
cagtgtgctgggattacagacgtgagtcactgtgcctggt

SEQ ID NO: 62985 - DNA, 40 bp, Homo sapiens
accaggcacagtgactcacgtctgtaatcccagcacactg

SEQ ID NO: 62986 - DNA, 40 bp, Homo sapiens
agtgtgctgggattacagacgtgagtcactgtgcctggtc

SEQ ID NO: 62987 - DNA, 40 bp, Homo sapiens
gaccaggcacagtgactcacgtctgtaatcccagcacact

SEQ ID NO: 62988 - DNA, 40 bp, Homo sapiens
gtgtgctgggattacagacgtgagtcactgtgcctggtct

SEQ ID NO: 62989 - DNA, 40 bp, Homo sapiens
agaccaggcacagtgactcacgtctgtaatcccagcacac

SEQ ID NO: 62990 - DNA, 40 bp, Homo sapiens
tgtgctgggattacagacgtgagtcactgtgcctggtctc

SEQ ID NO: 62991 - DNA, 40 bp, Homo sapiens
gagaccaggcacagtgactcacgtctgtaatcccagcaca

SEQ ID NO: 62992 - DNA, 40 bp, Homo sapiens
gtgctgggattacagacgtgagtcactgtgcctggtctct

SEQ ID NO: 62993 - DNA, 40 bp, Homo sapiens
agagaccaggcacagtgactcacgtctgtaatcccagcac

SEQ ID NO: 62994 - DNA, 40 bp, Homo sapiens
tgctgggattacagacgtgagtcactgtgcctggtctcta

SEQ ID NO: 62995 - DNA, 40 bp, Homo sapiens
tagagaccaggcacagtgactcacgtctgtaatcccagca

SEQ ID NO: 62996 - DNA, 40 bp, Homo sapiens
gctgggattacagacgtgagtcactgtgcctggtctctag

SEQ ID NO: 62997 - DNA, 40 bp, Homo sapiens
ctagagaccaggcacagtgactcacgtctgtaatcccagc

SEQ ID NO: 62998 - DNA, 40 bp, Homo sapiens
ctgggattacagacgtgagtcactgtgcctggtctctagt

SEQ ID NO: 62999 - DNA, 40 bp, Homo sapiens
actagagaccaggcacagtgactcacgtctgtaatcccag

SEQ ID NO: 63000 - DNA, 40 bp, Homo sapiens
tgggattacagacgtgagtcactgtgcctggtctctagta

SEQ ID NO: 63001 - DNA, 40 bp, Homo sapiens
tactagagaccaggcacagtgactcacgtctgtaatccca

SEQ ID NO: 63002 - DNA, 40 bp, Homo sapiens
gggattacagacgtgagtcactgtgcctggtctctagtat

SEQ ID NO: 63003 - DNA, 40 bp, Homo sapiens
atactagagaccaggcacagtgactcacgtctgtaatccc

SEQ ID NO: 63004 - DNA, 40 bp, Homo sapiens
ggattacagacgtgagtcactgtgcctggtctctagtatt

SEQ ID NO: 63005 - DNA, 40 bp, Homo sapiens
aatactagagaccaggcacagtgactcacgtctgtaatcc

SEQ ID NO: 63006 - DNA, 40 bp, Homo sapiens
gattacagacgtgagtcactgtgcctggtctctagtattt

SEQ ID NO: 63007 - DNA, 40 bp, Homo sapiens
aaatactagagaccaggcacagtgactcacgtctgtaatc

SEQ ID NO: 63008 - DNA, 40 bp, Homo sapiens
attacagacgtgagtcactgtgcctggtctctagtatttt

SEQ ID NO: 63009 - DNA, 40 bp, Homo sapiens
aaaatactagagaccaggcacagtgactcacgtctgtaat

SEQ ID NO: 63010 - DNA, 40 bp, Homo sapiens
ttacagacgtgagtcactgtgcctggtctctagtattttt

SEQ ID NO: 63011 - DNA, 40 bp, Homo sapiens
aaaaatactagagaccaggcacagtgactcacgtctgtaa

SEQ ID NO: 63012 - DNA, 40 bp, Homo sapiens
tacagacgtgagtcactgtgcctggtctctagtatttttt

SEQ ID NO: 63013 - DNA, 40 bp, Homo sapiens
aaaaaatactagagaccaggcacagtgactcacgtctgta

SEQ ID NO: 63014 - DNA, 40 bp, Homo sapiens
acagacgtgagtcactgtgcctggtctctagtattttttt

SEQ ID NO: 63015 - DNA, 40 bp, Homo sapiens
aaaaaaatactagagaccaggcacagtgactcacgtctgt

SEQ ID NO: 63016 - DNA, 40 bp, Homo sapiens
cagacgtgagtcactgtgcctggtctctagtatttttttt

SEQ ID NO: 63017 - DNA, 40 bp, Homo sapiens
aaaaaaaatactagagaccaggcacagtgactcacgtctg

SEQ ID NO: 63018 - DNA, 40 bp, Homo sapiens
agacgtgagtcactgtgcctggtctctagtattttttttt

SEQ ID NO: 63019 - DNA, 40 bp, Homo sapiens
aaaaaaaaatactagagaccaggcacagtgactcacgtct

SEQ ID NO: 63020 - DNA, 40 bp, Homo sapiens
gacgtgagtcactgtgcctggtctctagtatttttttttt

SEQ ID NO: 63021 - DNA, 40 bp, Homo sapiens
aaaaaaaaaatactagagaccaggcacagtgactcacgtc

SEQ ID NO: 63022 - DNA, 40 bp, Homo sapiens
acgtgagtcactgtgcctggtctctagtattttttttttt

SEQ ID NO: 63023 - DNA, 40 bp, Homo sapiens
aaaaaaaaaaatactagagaccaggcacagtgactcacgt

SEQ ID NO: 63024 - DNA, 40 bp, Homo sapiens
cgtgagtcactgtgcctggtctctagtatttttttttttt

SEQ ID NO: 63025 - DNA, 40 bp, Homo sapiens
aaaaaaaaaaaatactagagaccaggcacagtgactcacg

SEQ ID NO: 63026 - DNA, 40 bp, Homo sapiens
gtgagtcactgtgcctggtctctagtattttttttttttt

SEQ ID NO: 63027 - DNA, 40 bp, Homo sapiens
aaaaaaaaaaaaatactagagaccaggcacagtgactcac

SEQ ID NO: 63028 - DNA, 40 bp, Homo sapiens
tgagtcactgtgcctggtctctagtatttttttttttttt

SEQ ID NO: 63029 - DNA, 40 bp, Homo sapiens
aaaaaaaaaaaaaatactagagaccaggcacagtgactca

SEQ ID NO: 63030 - DNA, 40 bp, Homo sapiens
gagtcactgtgcctggtctctagtattttttttttttttg

SEQ ID NO: 63031 - DNA, 40 bp, Homo sapiens
caaaaaaaaaaaaaatactagagaccaggcacagtgactc

SEQ ID NO: 63032 - DNA, 40 bp, Homo sapiens
agtcactgtgcctggtctctagtattttttttttttttga

SEQ ID NO: 63033 - DNA, 40 bp, Homo sapiens
tcaaaaaaaaaaaaaatactagagaccaggcacagtgact

SEQ ID NO: 63034 - DNA, 40 bp, Homo sapiens
gtcactgtgcctggtctctagtattttttttttttttgag

SEQ ID NO: 63035 - DNA, 40 bp, Homo sapiens
ctcaaaaaaaaaaaaaatactagagaccaggcacagtgac

SEQ ID NO: 63036 - DNA, 40 bp, Homo sapiens
tcactgtgcctggtctctagtattttttttttttttgaga

SEQ ID NO: 63037 - DNA, 40 bp, Homo sapiens
tctcaaaaaaaaaaaaaatactagagaccaggcacagtga

SEQ ID NO: 63038 - DNA, 40 bp, Homo sapiens
cactgtgcctggtctctagtattttttttttttttgagac

SEQ ID NO: 63039 - DNA, 40 bp, Homo sapiens
gtctcaaaaaaaaaaaaaatactagagaccaggcacagtg

SEQ ID NO: 63040 - DNA, 40 bp, Homo sapiens
actgtgcctggtctctagtattttttttttttttgagacg

SEQ ID NO: 63041 - DNA, 40 bp, Homo sapiens
cgtctcaaaaaaaaaaaaaatactagagaccaggcacagt

SEQ ID NO: 63042 - DNA, 40 bp, Homo sapiens
ctgtgcctggtctctagtattttttttttttttgagacgg

SEQ ID NO: 63043 - DNA, 40 bp, Homo sapiens
ccgtctcaaaaaaaaaaaaaatactagagaccaggcacag

SEQ ID NO: 63044 - DNA, 40 bp, Homo sapiens
tgtgcctggtctctagtattttttttttttttgagacggt

SEQ ID NO: 63045 - DNA, 40 bp, Homo sapiens
accgtctcaaaaaaaaaaaaaatactagagaccaggcaca

SEQ ID NO: 63046 - DNA, 40 bp, Homo sapiens
gtgcctggtctctagtattttttttttttttgagacggtc

SEQ ID NO: 63047 - DNA, 40 bp, Homo sapiens
gaccgtctcaaaaaaaaaaaaaatactagagaccaggcac

SEQ ID NO: 63048 - DNA, 40 bp, Homo sapiens
tgcctggtctctagtattttttttttttttgagacggtct

SEQ ID NO: 63049 - DNA, 40 bp, Homo sapiens
agaccgtctcaaaaaaaaaaaaaatactagagaccaggca

SEQ ID NO: 63050 - DNA, 40 bp, Homo sapiens
gcctggtctctagtattttttttttttttgagacggtctc

SEQ ID NO: 63051 - DNA, 40 bp, Homo sapiens
gagaccgtctcaaaaaaaaaaaaaatactagagaccaggc

SEQ ID NO: 63052 - DNA, 40 bp, Homo sapiens
cctggtctctagtattttttttttttttgagacggtctca

SEQ ID NO: 63053 - DNA, 40 bp, Homo sapiens
tgagaccgtctcaaaaaaaaaaaaaatactagagaccagg

SEQ ID NO: 63054 - DNA, 40 bp, Homo sapiens
ctggtctctagtattttttttttttttgagacggtctcac

SEQ ID NO: 63055 - DNA, 40 bp, Homo sapiens
gtgagaccgtctcaaaaaaaaaaaaaatactagagaccag

SEQ ID NO: 63056 - DNA, 40 bp, Homo sapiens
tggtctctagtattttttttttttttgagacggtctcact

SEQ ID NO: 63057 - DNA, 40 bp, Homo sapiens
agtgagaccgtctcaaaaaaaaaaaaaatactagagacca

SEQ ID NO: 63058 - DNA, 40 bp, Homo sapiens
ggtctctagtattttttttttttttgagacggtctcactg

SEQ ID NO: 63059 - DNA, 40 bp, Homo sapiens
cagtgagaccgtctcaaaaaaaaaaaaaatactagagacc

SEQ ID NO: 63060 - DNA, 40 bp, Homo sapiens
gtctctagtattttttttttttttgagacggtctcactgt

SEQ ID NO: 63061 - DNA, 40 bp, Homo sapiens
acagtgagaccgtctcaaaaaaaaaaaaaatactagagac

SEQ ID NO: 63062 - DNA, 40 bp, Homo sapiens
tctctagtattttttttttttttgagacggtctcactgtt

SEQ ID NO: 63063 - DNA, 40 bp, Homo sapiens
aacagtgagaccgtctcaaaaaaaaaaaaaatactagaga

SEQ ID NO: 63064 - DNA, 40 bp, Homo sapiens
ctctagtattttttttttttttgagacggtctcactgttg

SEQ ID NO: 63065 - DNA, 40 bp, Homo sapiens
caacagtgagaccgtctcaaaaaaaaaaaaaatactagag

SEQ ID NO: 63066 - DNA, 40 bp, Homo sapiens
tctagtattttttttttttttgagacggtctcactgttgc

SEQ ID NO: 63067 - DNA, 40 bp, Homo sapiens
gcaacagtgagaccgtctcaaaaaaaaaaaaaatactaga

SEQ ID NO: 63068 - DNA, 40 bp, Homo sapiens
ctagtattttttttttttttgagacggtctcactgttgcc

SEQ ID NO: 63069 - DNA, 40 bp, Homo sapiens
ggcaacagtgagaccgtctcaaaaaaaaaaaaaatactag

SEQ ID NO: 63070 - DNA, 40 bp, Homo sapiens
tagtattttttttttttttgagacggtctcactgttgcca

SEQ ID NO: 63071 - DNA, 40 bp, Homo sapiens
tggcaacagtgagaccgtctcaaaaaaaaaaaaaatacta

SEQ ID NO: 63072 - DNA, 40 bp, Homo sapiens
agtattttttttttttttgagacggtctcactgttgccag

SEQ ID NO: 63073 - DNA, 40 bp, Homo sapiens
ctggcaacagtgagaccgtctcaaaaaaaaaaaaaatact

SEQ ID NO: 63074 - DNA, 40 bp, Homo sapiens
gtattttttttttttttgagacggtctcactgttgccagg

SEQ ID NO: 63075 - DNA, 40 bp, Homo sapiens
cctggcaacagtgagaccgtctcaaaaaaaaaaaaaatac

SEQ ID NO: 63076 - DNA, 40 bp, Homo sapiens
tattttttttttttttgagacggtctcactgttgccaggc

SEQ ID NO: 63077 - DNA, 40 bp, Homo sapiens
gcctggcaacagtgagaccgtctcaaaaaaaaaaaaaata

SEQ ID NO: 63078 - DNA, 40 bp, Homo sapiens
attttttttttttttgagacggtctcactgttgccaggct

SEQ ID NO: 63079 - DNA, 40 bp, Homo sapiens
agcctggcaacagtgagaccgtctcaaaaaaaaaaaaaat

SEQ ID NO: 63080 - DNA, 40 bp, Homo sapiens
ttttttttttttttgagacggtctcactgttgccaggctg

SEQ ID NO: 63081 - DNA, 40 bp, Homo sapiens
cagcctggcaacagtgagaccgtctcaaaaaaaaaaaaaa

SEQ ID NO: 63082 - DNA, 40 bp, Homo sapiens
tttttttttttttgagacggtctcactgttgccaggctgg

SEQ ID NO: 63083 - DNA, 40 bp, Homo sapiens
ccagcctggcaacagtgagaccgtctcaaaaaaaaaaaaa

SEQ ID NO: 63084 - DNA, 40 bp, Homo sapiens
ttttttttttttgagacggtctcactgttgccaggctgga

SEQ ID NO: 63085 - DNA, 40 bp, Homo sapiens
tccagcctggcaacagtgagaccgtctcaaaaaaaaaaaa

SEQ ID NO: 63086 - DNA, 40 bp, Homo sapiens
tttttttttttgagacggtctcactgttgccaggctggag

SEQ ID NO: 63087 - DNA, 40 bp, Homo sapiens
ctccagcctggcaacagtgagaccgtctcaaaaaaaaaaa

SEQ ID NO: 63088 - DNA, 40 bp, Homo sapiens
ttttttttttgagacggtctcactgttgccaggctggagt

SEQ ID NO: 63089 - DNA, 40 bp, Homo sapiens
actccagcctggcaacagtgagaccgtctcaaaaaaaaaa

SEQ ID NO: 63090 - DNA, 40 bp, Homo sapiens
tttttttttgagacggtctcactgttgccaggctggagtg

SEQ ID NO: 63091 - DNA, 40 bp, Homo sapiens
cactccagcctggcaacagtgagaccgtctcaaaaaaaaa

SEQ ID NO: 63092 - DNA, 40 bp, Homo sapiens
ttttttttgagacggtctcactgttgccaggctggagtgc

SEQ ID NO: 63093 - DNA, 40 bp, Homo sapiens
gcactccagcctggcaacagtgagaccgtctcaaaaaaaa

SEQ ID NO: 63094 - DNA, 40 bp, Homo sapiens
tttttttgagacggtctcactgttgccaggctggagtgca

SEQ ID NO: 63095 - DNA, 40 bp, Homo sapiens
tgcactccagcctggcaacagtgagaccgtctcaaaaaaa

SEQ ID NO: 63096 - DNA, 40 bp, Homo sapiens
ttttttgagacggtctcactgttgccaggctggagtgcag

SEQ ID NO: 63097 - DNA, 40 bp, Homo sapiens
ctgcactccagcctggcaacagtgagaccgtctcaaaaaa

SEQ ID NO: 63098 - DNA, 40 bp, Homo sapiens
tttttgagacggtctcactgttgccaggctggagtgcagt

SEQ ID NO: 63099 - DNA, 40 bp, Homo sapiens
actgcactccagcctggcaacagtgagaccgtctcaaaaa

SEQ ID NO: 63100 - DNA, 40 bp, Homo sapiens
ttttgagacggtctcactgttgccaggctggagtgcagtg

SEQ ID NO: 63101 - DNA, 40 bp, Homo sapiens
cactgcactccagcctggcaacagtgagaccgtctcaaaa

SEQ ID NO: 63102 - DNA, 40 bp, Homo sapiens
tttgagacggtctcactgttgccaggctggagtgcagtgg

SEQ ID NO: 63103 - DNA, 40 bp, Homo sapiens
ccactgcactccagcctggcaacagtgagaccgtctcaaa

SEQ ID NO: 63104 - DNA, 40 bp, Homo sapiens
ttgagacggtctcactgttgccaggctggagtgcagtggc

SEQ ID NO: 63105 - DNA, 40 bp, Homo sapiens
gccactgcactccagcctggcaacagtgagaccgtctcaa

SEQ ID NO: 63106 - DNA, 40 bp, Homo sapiens
tgagacggtctcactgttgccaggctggagtgcagtggcg

SEQ ID NO: 63107 - DNA, 40 bp, Homo sapiens
cgccactgcactccagcctggcaacagtgagaccgtctca

SEQ ID NO: 63108 - DNA, 40 bp, Homo sapiens
gagacggtctcactgttgccaggctggagtgcagtggcgc

SEQ ID NO: 63109 - DNA, 40 bp, Homo sapiens
gcgccactgcactccagcctggcaacagtgagaccgtctc

SEQ ID NO: 63110 - DNA, 40 bp, Homo sapiens
agacggtctcactgttgccaggctggagtgcagtggcgcg

SEQ ID NO: 63111 - DNA, 40 bp, Homo sapiens
cgcgccactgcactccagcctggcaacagtgagaccgtct

SEQ ID NO: 63112 - DNA, 40 bp, Homo sapiens
gacggtctcactgttgccaggctggagtgcagtggcgcga

SEQ ID NO: 63113 - DNA, 40 bp, Homo sapiens
tcgcgccactgcactccagcctggcaacagtgagaccgtc

SEQ ID NO: 63114 - DNA, 40 bp, Homo sapiens
acggtctcactgttgccaggctggagtgcagtggcgcgat

SEQ ID NO: 63115 - DNA, 40 bp, Homo sapiens
atcgcgccactgcactccagcctggcaacagtgagaccgt

SEQ ID NO: 63116 - DNA, 40 bp, Homo sapiens
cggtctcactgttgccaggctggagtgcagtggcgcgatc

SEQ ID NO: 63117 - DNA, 40 bp, Homo sapiens
gatcgcgccactgcactccagcctggcaacagtgagaccg

SEQ ID NO: 63118 - DNA, 40 bp, Homo sapiens
ggtctcactgttgccaggctggagtgcagtggcgcgatcc

SEQ ID NO: 63119 - DNA, 40 bp, Homo sapiens
ggatcgcgccactgcactccagcctggcaacagtgagacc

SEQ ID NO: 63120 - DNA, 40 bp, Homo sapiens
gtctcactgttgccaggctggagtgcagtggcgcgatcct

SEQ ID NO: 63121 - DNA, 40 bp, Homo sapiens
aggatcgcgccactgcactccagcctggcaacagtgagac

SEQ ID NO: 63122 - DNA, 40 bp, Homo sapiens
tctcactgttgccaggctggagtgcagtggcgcgatcctg

SEQ ID NO: 63123 - DNA, 40 bp, Homo sapiens
caggatcgcgccactgcactccagcctggcaacagtgaga

SEQ ID NO: 63124 - DNA, 40 bp, Homo sapiens
ctcactgttgccaggctggagtgcagtggcgcgatcctgg

SEQ ID NO: 63125 - DNA, 40 bp, Homo sapiens
ccaggatcgcgccactgcactccagcctggcaacagtgag

SEQ ID NO: 63126 - DNA, 40 bp, Homo sapiens
tcactgttgccaggctggagtgcagtggcgcgatcctggc

SEQ ID NO: 63127 - DNA, 40 bp, Homo sapiens
gccaggatcgcgccactgcactccagcctggcaacagtga

SEQ ID NO: 63128 - DNA, 40 bp, Homo sapiens
cactgttgccaggctggagtgcagtggcgcgatcctggct

SEQ ID NO: 63129 - DNA, 40 bp, Homo sapiens
agccaggatcgcgccactgcactccagcctggcaacagtg

SEQ ID NO: 63130 - DNA, 40 bp, Homo sapiens
actgttgccaggctggagtgcagtggcgcgatcctggctc

SEQ ID NO: 63131 - DNA, 40 bp, Homo sapiens
gagccaggatcgcgccactgcactccagcctggcaacagt

SEQ ID NO: 63132 - DNA, 40 bp, Homo sapiens
ctgttgccaggctggagtgcagtggcgcgatcctggctca

SEQ ID NO: 63133 - DNA, 40 bp, Homo sapiens
tgagccaggatcgcgccactgcactccagcctggcaacag

SEQ ID NO: 63134 - DNA, 40 bp, Homo sapiens
tgttgccaggctggagtgcagtggcgcgatcctggctcac

SEQ ID NO: 63135 - DNA, 40 bp, Homo sapiens
gtgagccaggatcgcgccactgcactccagcctggcaaca

SEQ ID NO: 63136 - DNA, 40 bp, Homo sapiens
gttgccaggctggagtgcagtggcgcgatcctggctcact

SEQ ID NO: 63137 - DNA, 40 bp, Homo sapiens
agtgagccaggatcgcgccactgcactccagcctggcaac

SEQ ID NO: 63138 - DNA, 40 bp, Homo sapiens
ttgccaggctggagtgcagtggcgcgatcctggctcactg

SEQ ID NO: 63139 - DNA, 40 bp, Homo sapiens
cagtgagccaggatcgcgccactgcactccagcctggcaa

SEQ ID NO: 63140 - DNA, 40 bp, Homo sapiens
tgccaggctggagtgcagtggcgcgatcctggctcactgc

SEQ ID NO: 63141 - DNA, 40 bp, Homo sapiens
gcagtgagccaggatcgcgccactgcactccagcctggca

SEQ ID NO: 63142 - DNA, 40 bp, Homo sapiens
gccaggctggagtgcagtggcgcgatcctggctcactgca

SEQ ID NO: 63143 - DNA, 40 bp, Homo sapiens
tgcagtgagccaggatcgcgccactgcactccagcctggc

SEQ ID NO: 63144 - DNA, 40 bp, Homo sapiens
ccaggctggagtgcagtggcgcgatcctggctcactgcaa

SEQ ID NO: 63145 - DNA, 40 bp, Homo sapiens
ttgcagtgagccaggatcgcgccactgcactccagcctgg

SEQ ID NO: 63146 - DNA, 40 bp, Homo sapiens
caggctggagtgcagtggcgcgatcctggctcactgcaac

SEQ ID NO: 63147 - DNA, 40 bp, Homo sapiens
gttgcagtgagccaggatcgcgccactgcactccagcctg

SEQ ID NO: 63148 - DNA, 40 bp, Homo sapiens
aggctggagtgcagtggcgcgatcctggctcactgcaacc

SEQ ID NO: 63149 - DNA, 40 bp, Homo sapiens
ggttgcagtgagccaggatcgcgccactgcactccagcct

SEQ ID NO: 63150 - DNA, 40 bp, Homo sapiens
ggctggagtgcagtggcgcgatcctggctcactgcaacct

SEQ ID NO: 63151 - DNA, 40 bp, Homo sapiens
aggttgcagtgagccaggatcgcgccactgcactccagcc

SEQ ID NO: 63152 - DNA, 40 bp, Homo sapiens
gctggagtgcagtggcgcgatcctggctcactgcaacctc

SEQ ID NO: 63153 - DNA, 40 bp, Homo sapiens
gaggttgcagtgagccaggatcgcgccactgcactccagc

SEQ ID NO: 63154 - DNA, 40 bp, Homo sapiens
ctggagtgcagtggcgcgatcctggctcactgcaacctcc

SEQ ID NO: 63155 - DNA, 40 bp, Homo sapiens
ggaggttgcagtgagccaggatcgcgccactgcactccag

SEQ ID NO: 63156 - DNA, 40 bp, Homo sapiens
tggagtgcagtggcgcgatcctggctcactgcaacctccg

SEQ ID NO: 63157 - DNA, 40 bp, Homo sapiens
cggaggttgcagtgagccaggatcgcgccactgcactcca

SEQ ID NO: 63158 - DNA, 40 bp, Homo sapiens
ggagtgcagtggcgcgatcctggctcactgcaacctccgc

SEQ ID NO: 63159 - DNA, 40 bp, Homo sapiens
gcggaggttgcagtgagccaggatcgcgccactgcactcc

SEQ ID NO: 63160 - DNA, 40 bp, Homo sapiens
gagtgcagtggcgcgatcctggctcactgcaacctccgct

SEQ ID NO: 63161 - DNA, 40 bp, Homo sapiens
agcggaggttgcagtgagccaggatcgcgccactgcactc

SEQ ID NO: 63162 - DNA, 40 bp, Homo sapiens
agtgcagtggcgcgatcctggctcactgcaacctccgctt

SEQ ID NO: 63163 - DNA, 40 bp, Homo sapiens
aagcggaggttgcagtgagccaggatcgcgccactgcact

SEQ ID NO: 63164 - DNA, 40 bp, Homo sapiens
gtgcagtggcgcgatcctggctcactgcaacctccgcttc

SEQ ID NO: 63165 - DNA, 40 bp, Homo sapiens
gaagcggaggttgcagtgagccaggatcgcgccactgcac

SEQ ID NO: 63166 - DNA, 40 bp, Homo sapiens
tgcagtggcgcgatcctggctcactgcaacctccgcttcc

SEQ ID NO: 63167 - DNA, 40 bp, Homo sapiens
ggaagcggaggttgcagtgagccaggatcgcgccactgca

SEQ ID NO: 63168 - DNA, 40 bp, Homo sapiens
gcagtggcgcgatcctggctcactgcaacctccgcttccc

SEQ ID NO: 63169 - DNA, 40 bp, Homo sapiens
gggaagcggaggttgcagtgagccaggatcgcgccactgc

SEQ ID NO: 63170 - DNA, 40 bp, Homo sapiens
cagtggcgcgatcctggctcactgcaacctccgcttcccg

SEQ ID NO: 63171 - DNA, 40 bp, Homo sapiens
cgggaagcggaggttgcagtgagccaggatcgcgccactg

SEQ ID NO: 63172 - DNA, 40 bp, Homo sapiens
agtggcgcgatcctggctcactgcaacctccgcttcccgg

SEQ ID NO: 63173 - DNA, 40 bp, Homo sapiens
ccgggaagcggaggttgcagtgagccaggatcgcgccact

SEQ ID NO: 63174 - DNA, 40 bp, Homo sapiens
gtggcgcgatcctggctcactgcaacctccgcttcccgga

SEQ ID NO: 63175 - DNA, 40 bp, Homo sapiens
tccgggaagcggaggttgcagtgagccaggatcgcgccac

SEQ ID NO: 63176 - DNA, 40 bp, Homo sapiens
tggcgcgatcctggctcactgcaacctccgcttcccggat

SEQ ID NO: 63177 - DNA, 40 bp, Homo sapiens
atccgggaagcggaggttgcagtgagccaggatcgcgcca

SEQ ID NO: 63178 - DNA, 40 bp, Homo sapiens
ggcgcgatcctggctcactgcaacctccgcttcccggatt

SEQ ID NO: 63179 - DNA, 40 bp, Homo sapiens
aatccgggaagcggaggttgcagtgagccaggatcgcgcc

SEQ ID NO: 63180 - DNA, 40 bp, Homo sapiens
gcgcgatcctggctcactgcaacctccgcttcccggattc

SEQ ID NO: 63181 - DNA, 40 bp, Homo sapiens
gaatccgggaagcggaggttgcagtgagccaggatcgcgc

SEQ ID NO: 63182 - DNA, 40 bp, Homo sapiens
cgcgatcctggctcactgcaacctccgcttcccggattca

SEQ ID NO: 63183 - DNA, 40 bp, Homo sapiens
tgaatccgggaagcggaggttgcagtgagccaggatcgcg

SEQ ID NO: 63184 - DNA, 40 bp, Homo sapiens
gcgatcctggctcactgcaacctccgcttcccggattcaa

SEQ ID NO: 63185 - DNA, 40 bp, Homo sapiens
ttgaatccgggaagcggaggttgcagtgagccaggatcgc

SEQ ID NO: 63186 - DNA, 40 bp, Homo sapiens
cgatcctggctcactgcaacctccgcttcccggattcaag

SEQ ID NO: 63187 - DNA, 40 bp, Homo sapiens
cttgaatccgggaagcggaggttgcagtgagccaggatcg

SEQ ID NO: 63188 - DNA, 40 bp, Homo sapiens
gatcctggctcactgcaacctccgcttcccggattcaagc

SEQ ID NO: 63189 - DNA, 40 bp, Homo sapiens
gcttgaatccgggaagcggaggttgcagtgagccaggatc

SEQ ID NO: 63190 - DNA, 40 bp, Homo sapiens
atcctggctcactgcaacctccgcttcccggattcaagcg

SEQ ID NO: 63191 - DNA, 40 bp, Homo sapiens
cgcttgaatccgggaagcggaggttgcagtgagccaggat

SEQ ID NO: 63192 - DNA, 40 bp, Homo sapiens
tcctggctcactgcaacctccgcttcccggattcaagcga

SEQ ID NO: 63193 - DNA, 40 bp, Homo sapiens
tcgcttgaatccgggaagcggaggttgcagtgagccagga

SEQ ID NO: 63194 - DNA, 40 bp, Homo sapiens
cctggctcactgcaacctccgcttcccggattcaagcgat

SEQ ID NO: 63195 - DNA, 40 bp, Homo sapiens
atcgcttgaatccgggaagcggaggttgcagtgagccagg

SEQ ID NO: 63196 - DNA, 40 bp, Homo sapiens
ctggctcactgcaacctccgcttcccggattcaagcgatt

SEQ ID NO: 63197 - DNA, 40 bp, Homo sapiens
aatcgcttgaatccgggaagcggaggttgcagtgagccag

SEQ ID NO: 63198 - DNA, 40 bp, Homo sapiens
tggctcactgcaacctccgcttcccggattcaagcgattt

SEQ ID NO: 63199 - DNA, 40 bp, Homo sapiens
aaatcgcttgaatccgggaagcggaggttgcagtgagcca

SEQ ID NO: 63200 - DNA, 40 bp, Homo sapiens
ggctcactgcaacctccgcttcccggattcaagcgatttt

SEQ ID NO: 63201 - DNA, 40 bp, Homo sapiens
aaaatcgcttgaatccgggaagcggaggttgcagtgagcc

SEQ ID NO: 63202 - DNA, 40 bp, Homo sapiens
gctcactgcaacctccgcttcccggattcaagcgattttc

SEQ ID NO: 63203 - DNA, 40 bp, Homo sapiens
gaaaatcgcttgaatccgggaagcggaggttgcagtgagc

SEQ ID NO: 63204 - DNA, 40 bp, Homo sapiens
ctcactgcaacctccgcttcccggattcaagcgattttcc

SEQ ID NO: 63205 - DNA, 40 bp, Homo sapiens
ggaaaatcgcttgaatccgggaagcggaggttgcagtgag

SEQ ID NO: 63206 - DNA, 40 bp, Homo sapiens
tcactgcaacctccgcttcccggattcaagcgattttcct

SEQ ID NO: 63207 - DNA, 40 bp, Homo sapiens
aggaaaatcgcttgaatccgggaagcggaggttgcagtga

SEQ ID NO: 63208 - DNA, 40 bp, Homo sapiens
cactgcaacctccgcttcccggattcaagcgattttcctg

SEQ ID NO: 63209 - DNA, 40 bp, Homo sapiens
caggaaaatcgcttgaatccgggaagcggaggttgcagtg

SEQ ID NO: 63210 - DNA, 40 bp, Homo sapiens
actgcaacctccgcttcccggattcaagcgattttcctgc

SEQ ID NO: 63211 - DNA, 40 bp, Homo sapiens
gcaggaaaatcgcttgaatccgggaagcggaggttgcagt

SEQ ID NO: 63212 - DNA, 40 bp, Homo sapiens
ctgcaacctccgcttcccggattcaagcgattttcctgcc

SEQ ID NO: 63213 - DNA, 40 bp, Homo sapiens
ggcaggaaaatcgcttgaatccgggaagcggaggttgcag

SEQ ID NO: 63214 - DNA, 40 bp, Homo sapiens
tgcaacctccgcttcccggattcaagcgattttcctgcct

SEQ ID NO: 63215 - DNA, 40 bp, Homo sapiens
aggcaggaaaatcgcttgaatccgggaagcggaggttgca

SEQ ID NO: 63216 - DNA, 40 bp, Homo sapiens
gcaacctccgcttcccggattcaagcgattttcctgcctc

SEQ ID NO: 63217 - DNA, 40 bp, Homo sapiens
gaggcaggaaaatcgcttgaatccgggaagcggaggttgc

SEQ ID NO: 63218 - DNA, 40 bp, Homo sapiens
caacctccgcttcccggattcaagcgattttcctgcctca

SEQ ID NO: 63219 - DNA, 40 bp, Homo sapiens
tgaggcaggaaaatcgcttgaatccgggaagcggaggttg

SEQ ID NO: 63220 - DNA, 40 bp, Homo sapiens
aacctccgcttcccggattcaagcgattttcctgcctcag

SEQ ID NO: 63221 - DNA, 40 bp, Homo sapiens
ctgaggcaggaaaatcgcttgaatccgggaagcggaggtt

SEQ ID NO: 63222 - DNA, 40 bp, Homo sapiens
acctccgcttcccggattcaagcgattttcctgcctcagc

SEQ ID NO: 63223 - DNA, 40 bp, Homo sapiens
gctgaggcaggaaaatcgcttgaatccgggaagcggaggt

SEQ ID NO: 63224 - DNA, 40 bp, Homo sapiens
cctccgcttcccggattcaagcgattttcctgcctcagcc

SEQ ID NO: 63225 - DNA, 40 bp, Homo sapiens
ggctgaggcaggaaaatcgcttgaatccgggaagcggagg

SEQ ID NO: 63226 - DNA, 40 bp, Homo sapiens
ctccgcttcccggattcaagcgattttcctgcctcagcct

SEQ ID NO: 63227 - DNA, 40 bp, Homo sapiens
aggctgaggcaggaaaatcgcttgaatccgggaagcggag

SEQ ID NO: 63228 - DNA, 40 bp, Homo sapiens
tccgcttcccggattcaagcgattttcctgcctcagcctc

SEQ ID NO: 63229 - DNA, 40 bp, Homo sapiens
gaggctgaggcaggaaaatcgcttgaatccgggaagcgga

SEQ ID NO: 63230 - DNA, 40 bp, Homo sapiens
ccgcttcccggattcaagcgattttcctgcctcagcctcc

SEQ ID NO: 63231 - DNA, 40 bp, Homo sapiens
ggaggctgaggcaggaaaatcgcttgaatccgggaagcgg

SEQ ID NO: 63232 - DNA, 40 bp, Homo sapiens
cgcttcccggattcaagcgattttcctgcctcagcctcct

SEQ ID NO: 63233 - DNA, 40 bp, Homo sapiens
aggaggctgaggcaggaaaatcgcttgaatccgggaagcg

SEQ ID NO: 63234 - DNA, 40 bp, Homo sapiens
gcttcccggattcaagcgattttcctgcctcagcctcctg

SEQ ID NO: 63235 - DNA, 40 bp, Homo sapiens
caggaggctgaggcaggaaaatcgcttgaatccgggaagc

SEQ ID NO: 63236 - DNA, 40 bp, Homo sapiens
cttcccggattcaagcgattttcctgcctcagcctcctga

SEQ ID NO: 63237 - DNA, 40 bp, Homo sapiens
tcaggaggctgaggcaggaaaatcgcttgaatccgggaag

SEQ ID NO: 63238 - DNA, 40 bp, Homo sapiens
ttcccggattcaagcgattttcctgcctcagcctcctgag

SEQ ID NO: 63239 - DNA, 40 bp, Homo sapiens
ctcaggaggctgaggcaggaaaatcgcttgaatccgggaa

SEQ ID NO: 63240 - DNA, 40 bp, Homo sapiens
tcccggattcaagcgattttcctgcctcagcctcctgagt

SEQ ID NO: 63241 - DNA, 40 bp, Homo sapiens
actcaggaggctgaggcaggaaaatcgcttgaatccggga

SEQ ID NO: 63242 - DNA, 40 bp, Homo sapiens
cccggattcaagcgattttcctgcctcagcctcctgagta

SEQ ID NO: 63243 - DNA, 40 bp, Homo sapiens
tactcaggaggctgaggcaggaaaatcgcttgaatccggg

SEQ ID NO: 63244 - DNA, 40 bp, Homo sapiens
ccggattcaagcgattttcctgcctcagcctcctgagtag

SEQ ID NO: 63245 - DNA, 40 bp, Homo sapiens
ctactcaggaggctgaggcaggaaaatcgcttgaatccgg

SEQ ID NO: 63246 - DNA, 40 bp, Homo sapiens
cggattcaagcgattttcctgcctcagcctcctgagtagc

SEQ ID NO: 63247 - DNA, 40 bp, Homo sapiens
gctactcaggaggctgaggcaggaaaatcgcttgaatccg

SEQ ID NO: 63248 - DNA, 40 bp, Homo sapiens
ggattcaagcgattttcctgcctcagcctcctgagtagct

SEQ ID NO: 63249 - DNA, 40 bp, Homo sapiens
agctactcaggaggctgaggcaggaaaatcgcttgaatcc

SEQ ID NO: 63250 - DNA, 40 bp, Homo sapiens
gattcaagcgattttcctgcctcagcctcctgagtagctg

SEQ ID NO: 63251 - DNA, 40 bp, Homo sapiens
cagctactcaggaggctgaggcaggaaaatcgcttgaatc

SEQ ID NO: 63252 - DNA, 40 bp, Homo sapiens
attcaagcgattttcctgcctcagcctcctgagtagctgg

SEQ ID NO: 63253 - DNA, 40 bp, Homo sapiens
ccagctactcaggaggctgaggcaggaaaatcgcttgaat

SEQ ID NO: 63254 - DNA, 40 bp, Homo sapiens
ttcaagcgattttcctgcctcagcctcctgagtagctggg

SEQ ID NO: 63255 - DNA, 40 bp, Homo sapiens
cccagctactcaggaggctgaggcaggaaaatcgcttgaa

SEQ ID NO: 63256 - DNA, 40 bp, Homo sapiens
tcaagcgattttcctgcctcagcctcctgagtagctggga

SEQ ID NO: 63257 - DNA, 40 bp, Homo sapiens
tcccagctactcaggaggctgaggcaggaaaatcgcttga

SEQ ID NO: 63258 - DNA, 40 bp, Homo sapiens
caagcgattttcctgcctcagcctcctgagtagctgggac

SEQ ID NO: 63259 - DNA, 40 bp, Homo sapiens
gtcccagctactcaggaggctgaggcaggaaaatcgcttg

SEQ ID NO: 63260 - DNA, 40 bp, Homo sapiens
aagcgattttcctgcctcagcctcctgagtagctgggact

SEQ ID NO: 63261 - DNA, 40 bp, Homo sapiens
agtcccagctactcaggaggctgaggcaggaaaatcgctt

SEQ ID NO: 63262 - DNA, 40 bp, Homo sapiens
agcgattttcctgcctcagcctcctgagtagctgggacta

SEQ ID NO: 63263 - DNA, 40 bp, Homo sapiens
tagtcccagctactcaggaggctgaggcaggaaaatcgct

SEQ ID NO: 63264 - DNA, 40 bp, Homo sapiens
gcgattttcctgcctcagcctcctgagtagctgggactat

SEQ ID NO: 63265 - DNA, 40 bp, Homo sapiens
atagtcccagctactcaggaggctgaggcaggaaaatcgc

SEQ ID NO: 63266 - DNA, 40 bp, Homo sapiens
cgattttcctgcctcagcctcctgagtagctgggactatg

SEQ ID NO: 63267 - DNA, 40 bp, Homo sapiens
catagtcccagctactcaggaggctgaggcaggaaaatcg

SEQ ID NO: 63268 - DNA, 40 bp, Homo sapiens
gattttcctgcctcagcctcctgagtagctgggactatgg

SEQ ID NO: 63269 - DNA, 40 bp, Homo sapiens
ccatagtcccagctactcaggaggctgaggcaggaaaatc

SEQ ID NO: 63270 - DNA, 40 bp, Homo sapiens
attttcctgcctcagcctcctgagtagctgggactatggg

SEQ ID NO: 63271 - DNA, 40 bp, Homo sapiens
cccatagtcccagctactcaggaggctgaggcaggaaaat

SEQ ID NO: 63272 - DNA, 40 bp, Homo sapiens
ttttcctgcctcagcctcctgagtagctgggactatgggt

SEQ ID NO: 63273 - DNA, 40 bp, Homo sapiens
acccatagtcccagctactcaggaggctgaggcaggaaaa

SEQ ID NO: 63274 - DNA, 40 bp, Homo sapiens
tttcctgcctcagcctcctgagtagctgggactatgggtg

SEQ ID NO: 63275 - DNA, 40 bp, Homo sapiens
cacccatagtcccagctactcaggaggctgaggcaggaaa

SEQ ID NO: 63276 - DNA, 40 bp, Homo sapiens
ttcctgcctcagcctcctgagtagctgggactatgggtgc

SEQ ID NO: 63277 - DNA, 40 bp, Homo sapiens
gcacccatagtcccagctactcaggaggctgaggcaggaa

SEQ ID NO: 63278 - DNA, 40 bp, Homo sapiens
tcctgcctcagcctcctgagtagctgggactatgggtgca

SEQ ID NO: 63279 - DNA, 40 bp, Homo sapiens
tgcacccatagtcccagctactcaggaggctgaggcagga

SEQ ID NO: 63280 - DNA, 40 bp, Homo sapiens
cctgcctcagcctcctgagtagctgggactatgggtgcac

SEQ ID NO: 63281 - DNA, 40 bp, Homo sapiens
gtgcacccatagtcccagctactcaggaggctgaggcagg

SEQ ID NO: 63282 - DNA, 40 bp, Homo sapiens
ctgcctcagcctcctgagtagctgggactatgggtgcaca

SEQ ID NO: 63283 - DNA, 40 bp, Homo sapiens
tgtgcacccatagtcccagctactcaggaggctgaggcag

SEQ ID NO: 63284 - DNA, 40 bp, Homo sapiens
tgcctcagcctcctgagtagctgggactatgggtgcacac

SEQ ID NO: 63285 - DNA, 40 bp, Homo sapiens
gtgtgcacccatagtcccagctactcaggaggctgaggca

SEQ ID NO: 63286 - DNA, 40 bp, Homo sapiens
gcctcagcctcctgagtagctgggactatgggtgcacacc

SEQ ID NO: 63287 - DNA, 40 bp, Homo sapiens
ggtgtgcacccatagtcccagctactcaggaggctgaggc

SEQ ID NO: 63288 - DNA, 40 bp, Homo sapiens
cctcagcctcctgagtagctgggactatgggtgcacacca

SEQ ID NO: 63289 - DNA, 40 bp, Homo sapiens
tggtgtgcacccatagtcccagctactcaggaggctgagg

SEQ ID NO: 63290 - DNA, 40 bp, Homo sapiens
ctcagcctcctgagtagctgggactatgggtgcacaccac

SEQ ID NO: 63291 - DNA, 40 bp, Homo sapiens
gtggtgtgcacccatagtcccagctactcaggaggctgag

SEQ ID NO: 63292 - DNA, 40 bp, Homo sapiens
tcagcctcctgagtagctgggactatgggtgcacaccacc

SEQ ID NO: 63293 - DNA, 40 bp, Homo sapiens
ggtggtgtgcacccatagtcccagctactcaggaggctga

SEQ ID NO: 63294 - DNA, 40 bp, Homo sapiens
cagcctcctgagtagctgggactatgggtgcacaccacca

SEQ ID NO: 63295 - DNA, 40 bp, Homo sapiens
tggtggtgtgcacccatagtcccagctactcaggaggctg

SEQ ID NO: 63296 - DNA, 40 bp, Homo sapiens
agcctcctgagtagctgggactatgggtgcacaccaccac

SEQ ID NO: 63297 - DNA, 40 bp, Homo sapiens
gtggtggtgtgcacccatagtcccagctactcaggaggct

SEQ ID NO: 63298 - DNA, 40 bp, Homo sapiens
gcctcctgagtagctgggactatgggtgcacaccaccacg

SEQ ID NO: 63299 - DNA, 40 bp, Homo sapiens
cgtggtggtgtgcacccatagtcccagctactcaggaggc

SEQ ID NO: 63300 - DNA, 40 bp, Homo sapiens
cctcctgagtagctgggactatgggtgcacaccaccacgc

SEQ ID NO: 63301 - DNA, 40 bp, Homo sapiens
gcgtggtggtgtgcacccatagtcccagctactcaggagg

SEQ ID NO: 63302 - DNA, 40 bp, Homo sapiens
ctcctgagtagctgggactatgggtgcacaccaccacgcc

SEQ ID NO: 63303 - DNA, 40 bp, Homo sapiens
ggcgtggtggtgtgcacccatagtcccagctactcaggag

SEQ ID NO: 63304 - DNA, 40 bp, Homo sapiens
tcctgagtagctgggactatgggtgcacaccaccacgccc

SEQ ID NO: 63305 - DNA, 40 bp, Homo sapiens
gggcgtggtggtgtgcacccatagtcccagctactcagga

SEQ ID NO: 63306 - DNA, 40 bp, Homo sapiens
cctgagtagctgggactatgggtgcacaccaccacgccca

SEQ ID NO: 63307 - DNA, 40 bp, Homo sapiens
tgggcgtggtggtgtgcacccatagtcccagctactcagg

SEQ ID NO: 63308 - DNA, 40 bp, Homo sapiens
ctgagtagctgggactatgggtgcacaccaccacgcccag

SEQ ID NO: 63309 - DNA, 40 bp, Homo sapiens
ctgggcgtggtggtgtgcacccatagtcccagctactcag

SEQ ID NO: 63310 - DNA, 40 bp, Homo sapiens
tgagtagctgggactatgggtgcacaccaccacgcccagc

SEQ ID NO: 63311 - DNA, 40 bp, Homo sapiens
gctgggcgtggtggtgtgcacccatagtcccagctactca

SEQ ID NO: 63312 - DNA, 40 bp, Homo sapiens
gagtagctgggactatgggtgcacaccaccacgcccagct

SEQ ID NO: 63313 - DNA, 40 bp, Homo sapiens
agctgggcgtggtggtgtgcacccatagtcccagctactc

SEQ ID NO: 63314 - DNA, 40 bp, Homo sapiens
agtagctgggactatgggtgcacaccaccacgcccagcta

SEQ ID NO: 63315 - DNA, 40 bp, Homo sapiens
tagctgggcgtggtggtgtgcacccatagtcccagctact

SEQ ID NO: 63316 - DNA, 40 bp, Homo sapiens
gtagctgggactatgggtgcacaccaccacgcccagctaa

SEQ ID NO: 63317 - DNA, 40 bp, Homo sapiens
ttagctgggcgtggtggtgtgcacccatagtcccagctac

SEQ ID NO: 63318 - DNA, 40 bp, Homo sapiens
tagctgggactatgggtgcacaccaccacgcccagctaat

SEQ ID NO: 63319 - DNA, 40 bp, Homo sapiens
attagctgggcgtggtggtgtgcacccatagtcccagcta

SEQ ID NO: 63320 - DNA, 40 bp, Homo sapiens
agctgggactatgggtgcacaccaccacgcccagctaatt

SEQ ID NO: 63321 - DNA, 40 bp, Homo sapiens
aattagctgggcgtggtggtgtgcacccatagtcccagct

SEQ ID NO: 63322 - DNA, 40 bp, Homo sapiens
gctgggactatgggtgcacaccaccacgcccagctaattt

SEQ ID NO: 63323 - DNA, 40 bp, Homo sapiens
aaattagctgggcgtggtggtgtgcacccatagtcccagc

SEQ ID NO: 63324 - DNA, 40 bp, Homo sapiens
ctgggactatgggtgcacaccaccacgcccagctaatttt

SEQ ID NO: 63325 - DNA, 40 bp, Homo sapiens
aaaattagctgggcgtggtggtgtgcacccatagtcccag

SEQ ID NO: 63326 - DNA, 40 bp, Homo sapiens
tgggactatgggtgcacaccaccacgcccagctaattttt

SEQ ID NO: 63327 - DNA, 40 bp, Homo sapiens
aaaaattagctgggcgtggtggtgtgcacccatagtccca

SEQ ID NO: 63328 - DNA, 40 bp, Homo sapiens
gggactatgggtgcacaccaccacgcccagctaatttttg

SEQ ID NO: 63329 - DNA, 40 bp, Homo sapiens
caaaaattagctgggcgtggtggtgtgcacccatagtccc

SEQ ID NO: 63330 - DNA, 40 bp, Homo sapiens
ggactatgggtgcacaccaccacgcccagctaatttttgt

SEQ ID NO: 63331 - DNA, 40 bp, Homo sapiens
acaaaaattagctgggcgtggtggtgtgcacccatagtcc

SEQ ID NO: 63332 - DNA, 40 bp, Homo sapiens
gactatgggtgcacaccaccacgcccagctaatttttgta

SEQ ID NO: 63333 - DNA, 40 bp, Homo sapiens
tacaaaaattagctgggcgtggtggtgtgcacccatagtc

SEQ ID NO: 63334 - DNA, 40 bp, Homo sapiens
actatgggtgcacaccaccacgcccagctaatttttgtat

SEQ ID NO: 63335 - DNA, 40 bp, Homo sapiens
atacaaaaattagctgggcgtggtggtgtgcacccatagt

SEQ ID NO: 63336 - DNA, 40 bp, Homo sapiens
ctatgggtgcacaccaccacgcccagctaatttttgtatt

SEQ ID NO: 63337 - DNA, 40 bp, Homo sapiens
aatacaaaaattagctgggcgtggtggtgtgcacccatag

SEQ ID NO: 63338 - DNA, 40 bp, Homo sapiens
tatgggtgcacaccaccacgcccagctaatttttgtattt

SEQ ID NO: 63339 - DNA, 40 bp, Homo sapiens
aaatacaaaaattagctgggcgtggtggtgtgcacccata

SEQ ID NO: 63340 - DNA, 40 bp, Homo sapiens
atgggtgcacaccaccacgcccagctaatttttgtatttt

SEQ ID NO: 63341 - DNA, 40 bp, Homo sapiens
aaaatacaaaaattagctgggcgtggtggtgtgcacccat

SEQ ID NO: 63342 - DNA, 40 bp, Homo sapiens
tgggtgcacaccaccacgcccagctaatttttgtattttt

SEQ ID NO: 63343 - DNA, 40 bp, Homo sapiens
aaaaatacaaaaattagctgggcgtggtggtgtgcaccca

SEQ ID NO: 63344 - DNA, 40 bp, Homo sapiens
gggtgcacaccaccacgcccagctaatttttgtattttta

SEQ ID NO: 63345 - DNA, 40 bp, Homo sapiens
taaaaatacaaaaattagctgggcgtggtggtgtgcaccc

SEQ ID NO: 63346 - DNA, 40 bp, Homo sapiens
ggtgcacaccaccacgcccagctaatttttgtatttttag

SEQ ID NO: 63347 - DNA, 40 bp, Homo sapiens
ctaaaaatacaaaaattagctgggcgtggtggtgtgcacc

SEQ ID NO: 63348 - DNA, 40 bp, Homo sapiens
gtgcacaccaccacgcccagctaatttttgtatttttagt

SEQ ID NO: 63349 - DNA, 40 bp, Homo sapiens
actaaaaatacaaaaattagctgggcgtggtggtgtgcac

SEQ ID NO: 63350 - DNA, 40 bp, Homo sapiens
tgcacaccaccacgcccagctaatttttgtatttttagta

SEQ ID NO: 63351 - DNA, 40 bp, Homo sapiens
tactaaaaatacaaaaattagctgggcgtggtggtgtgca

SEQ ID NO: 63352 - DNA, 40 bp, Homo sapiens
gcacaccaccacgcccagctaatttttgtatttttagtag

SEQ ID NO: 63353 - DNA, 40 bp, Homo sapiens
ctactaaaaatacaaaaattagctgggcgtggtggtgtgc

SEQ ID NO: 63354 - DNA, 40 bp, Homo sapiens
cacaccaccacgcccagctaatttttgtatttttagtaga

SEQ ID NO: 63355 - DNA, 40 bp, Homo sapiens
tctactaaaaatacaaaaattagctgggcgtggtggtgtg

SEQ ID NO: 63356 - DNA, 40 bp, Homo sapiens
acaccaccacgcccagctaatttttgtatttttagtagag

SEQ ID NO: 63357 - DNA, 40 bp, Homo sapiens
ctctactaaaaatacaaaaattagctgggcgtggtggtgt

SEQ ID NO: 63358 - DNA, 40 bp, Homo sapiens
caccaccacgcccagctaatttttgtatttttagtagaga

SEQ ID NO: 63359 - DNA, 40 bp, Homo sapiens
tctctactaaaaatacaaaaattagctgggcgtggtggtg

SEQ ID NO: 63360 - DNA, 40 bp, Homo sapiens
accaccacgcccagctaatttttgtatttttagtagagac

SEQ ID NO: 63361 - DNA, 40 bp, Homo sapiens
gtctctactaaaaatacaaaaattagctgggcgtggtggt

SEQ ID NO: 63362 - DNA, 40 bp, Homo sapiens
ccaccacgcccagctaatttttgtatttttagtagagacg

SEQ ID NO: 63363 - DNA, 40 bp, Homo sapiens
cgtctctactaaaaatacaaaaattagctgggcgtggtgg

SEQ ID NO: 63364 - DNA, 40 bp, Homo sapiens
caccacgcccagctaatttttgtatttttagtagagacgg

SEQ ID NO: 63365 - DNA, 40 bp, Homo sapiens
ccgtctctactaaaaatacaaaaattagctgggcgtggtg

SEQ ID NO: 63366 - DNA, 40 bp, Homo sapiens
accacgcccagctaatttttgtatttttagtagagacggg

SEQ ID NO: 63367 - DNA, 40 bp, Homo sapiens
cccgtctctactaaaaatacaaaaattagctgggcgtggt

SEQ ID NO: 63368 - DNA, 40 bp, Homo sapiens
ccacgcccagctaatttttgtatttttagtagagacgggg

SEQ ID NO: 63369 - DNA, 40 bp, Homo sapiens
ccccgtctctactaaaaatacaaaaattagctgggcgtgg

SEQ ID NO: 63370 - DNA, 40 bp, Homo sapiens
cacgcccagctaatttttgtatttttagtagagacggggt

SEQ ID NO: 63371 - DNA, 40 bp, Homo sapiens
accccgtctctactaaaaatacaaaaattagctgggcgtg

SEQ ID NO: 63372 - DNA, 40 bp, Homo sapiens
acgcccagctaatttttgtatttttagtagagacggggtt

SEQ ID NO: 63373 - DNA, 40 bp, Homo sapiens
aaccccgtctctactaaaaatacaaaaattagctgggcgt

SEQ ID NO: 63374 - DNA, 40 bp, Homo sapiens
cgcccagctaatttttgtatttttagtagagacggggttt

SEQ ID NO: 63375 - DNA, 40 bp, Homo sapiens
aaaccccgtctctactaaaaatacaaaaattagctgggcg

SEQ ID NO: 63376 - DNA, 40 bp, Homo sapiens
gcccagctaatttttgtatttttagtagagacggggtttc

SEQ ID NO: 63377 - DNA, 40 bp, Homo sapiens
gaaaccccgtctctactaaaaatacaaaaattagctgggc

SEQ ID NO: 63378 - DNA, 40 bp, Homo sapiens
cccagctaatttttgtatttttagtagagacggggtttca

SEQ ID NO: 63379 - DNA, 40 bp, Homo sapiens
tgaaaccccgtctctactaaaaatacaaaaattagctggg

SEQ ID NO: 63380 - DNA, 40 bp, Homo sapiens
ccagctaatttttgtatttttagtagagacggggtttcac

SEQ ID NO: 63381 - DNA, 40 bp, Homo sapiens
gtgaaaccccgtctctactaaaaatacaaaaattagctgg

SEQ ID NO: 63382 - DNA, 40 bp, Homo sapiens
cagctaatttttgtatttttagtagagacggggtttcacc

SEQ ID NO: 63383 - DNA, 40 bp, Homo sapiens
ggtgaaaccccgtctctactaaaaatacaaaaattagctg

SEQ ID NO: 63384 - DNA, 40 bp, Homo sapiens
agctaatttttgtatttttagtagagacggggtttcacca

SEQ ID NO: 63385 - DNA, 40 bp, Homo sapiens
tggtgaaaccccgtctctactaaaaatacaaaaattagct

SEQ ID NO: 63386 - DNA, 40 bp, Homo sapiens
gctaatttttgtatttttagtagagacggggtttcaccat

SEQ ID NO: 63387 - DNA, 40 bp, Homo sapiens
atggtgaaaccccgtctctactaaaaatacaaaaattagc

SEQ ID NO: 63388 - DNA, 40 bp, Homo sapiens
ctaatttttgtatttttagtagagacggggtttcaccatg

SEQ ID NO: 63389 - DNA, 40 bp, Homo sapiens
catggtgaaaccccgtctctactaaaaatacaaaaattag

SEQ ID NO: 63390 - DNA, 40 bp, Homo sapiens
taatttttgtatttttagtagagacggggtttcaccatgt

SEQ ID NO: 63391 - DNA, 40 bp, Homo sapiens
acatggtgaaaccccgtctctactaaaaatacaaaaatta

SEQ ID NO: 63392 - DNA, 40 bp, Homo sapiens
aatttttgtatttttagtagagacggggtttcaccatgtt

SEQ ID NO: 63393 - DNA, 40 bp, Homo sapiens
aacatggtgaaaccccgtctctactaaaaatacaaaaatt

SEQ ID NO: 63394 - DNA, 40 bp, Homo sapiens
atttttgtatttttagtagagacggggtttcaccatgttg

SEQ ID NO: 63395 - DNA, 40 bp, Homo sapiens
caacatggtgaaaccccgtctctactaaaaatacaaaaat

SEQ ID NO: 63396 - DNA, 40 bp, Homo sapiens; identical to SEQ ID NO: 24944

SEQ ID NO: 63397 - DNA, 40 bp, Homo sapiens; identical to SEQ ID NO: 24945

SEQ ID NO: 63398 - DNA, 40 bp, Homo sapiens; identical to SEQ ID NO: 24946

SEQ ID NO: 63399 - DNA, 40 bp, Homo sapiens; identical to SEQ ID NO: 24947

SEQ ID NO: 63400 - DNA, 40 bp, Homo sapiens; identical to SEQ ID NO: 24948

SEQ ID NO: 63401 - DNA, 40 bp, Homo sapiens; identical to SEQ ID NO: 24949

SEQ ID NO: 63402 - DNA, 40 bp, Homo sapiens; identical to SEQ ID NO: 24950

SEQ ID NO: 63403 - DNA, 40 bp, Homo sapiens; identical to SEQ ID NO: 24951

SEQ ID NO: 63404 - DNA, 40 bp, Homo sapiens
tgtatttttagtagagacggggtttcaccatgttggccaa

SEQ ID NO: 63405 - DNA, 40 bp, Homo sapiens
ttggccaacatggtgaaaccccgtctctactaaaaataca

SEQ ID NO: 63406 - DNA, 40 bp, Homo sapiens
gtatttttagtagagacggggtttcaccatgttggccaat

SEQ ID NO: 63407 - DNA, 40 bp, Homo sapiens
attggccaacatggtgaaaccccgtctctactaaaaatac

SEQ ID NO: 63408 - DNA, 40 bp, Homo sapiens
tatttttagtagagacggggtttcaccatgttggccaata

SEQ ID NO: 63409 - DNA, 40 bp, Homo sapiens
tattggccaacatggtgaaaccccgtctctactaaaaata

SEQ ID NO: 63410 - DNA, 40 bp, Homo sapiens
atttttagtagagacggggtttcaccatgttggccaatat

SEQ ID NO: 63411 - DNA, 40 bp, Homo sapiens
atattggccaacatggtgaaaccccgtctctactaaaaat

SEQ ID NO: 63412 - DNA, 40 bp, Homo sapiens
tttttagtagagacggggtttcaccatgttggccaatatg

SEQ ID NO: 63413 - DNA, 40 bp, Homo sapiens
catattggccaacatggtgaaaccccgtctctactaaaaa

SEQ ID NO: 63414 - DNA, 40 bp, Homo sapiens
ttttagtagagacggggtttcaccatgttggccaatatgg

SEQ ID NO: 63415 - DNA, 40 bp, Homo sapiens
ccatattggccaacatggtgaaaccccgtctctactaaaa

SEQ ID NO: 63416 - DNA, 40 bp, Homo sapiens
tttagtagagacggggtttcaccatgttggccaatatggt

SEQ ID NO: 63417 - DNA, 40 bp, Homo sapiens
accatattggccaacatggtgaaaccccgtctctactaaa

SEQ ID NO: 63418 - DNA, 40 bp, Homo sapiens
ttagtagagacggggtttcaccatgttggccaatatggtc

SEQ ID NO: 63419 - DNA, 40 bp, Homo sapiens
gaccatattggccaacatggtgaaaccccgtctctactaa

SEQ ID NO: 63420 - DNA, 40 bp, Homo sapiens
tagtagagacggggtttcaccatgttggccaatatggtct

SEQ ID NO: 63421 - DNA, 40 bp, Homo sapiens
agaccatattggccaacatggtgaaaccccgtctctacta

SEQ ID NO: 63422 - DNA, 40 bp, Homo sapiens
agtagagacggggtttcaccatgttggccaatatggtctc

SEQ ID NO: 63423 - DNA, 40 bp, Homo sapiens
gagaccatattggccaacatggtgaaaccccgtctctact

SEQ ID NO: 63424 - DNA, 40 bp, Homo sapiens
gtagagacggggtttcaccatgttggccaatatggtctca

SEQ ID NO: 63425 - DNA, 40 bp, Homo sapiens
tgagaccatattggccaacatggtgaaaccccgtctctac

SEQ ID NO: 63426 - DNA, 40 bp, Homo sapiens
tagagacggggtttcaccatgttggccaatatggtctcaa

SEQ ID NO: 63427 - DNA, 40 bp, Homo sapiens
ttgagaccatattggccaacatggtgaaaccccgtctcta

SEQ ID NO: 63428 - DNA, 40 bp, Homo sapiens
agagacggggtttcaccatgttggccaatatggtctcaat

SEQ ID NO: 63429 - DNA, 40 bp, Homo sapiens
attgagaccatattggccaacatggtgaaaccccgtctct

SEQ ID NO: 63430 - DNA, 40 bp, Homo sapiens
gagacggggtttcaccatgttggccaatatggtctcaatc

SEQ ID NO: 63431 - DNA, 40 bp, Homo sapiens
gattgagaccatattggccaacatggtgaaaccccgtctc

SEQ ID NO: 63432 - DNA, 40 bp, Homo sapiens
agacggggtttcaccatgttggccaatatggtctcaatct

SEQ ID NO: 63433 - DNA, 40 bp, Homo sapiens
agattgagaccatattggccaacatggtgaaaccccgtct

SEQ ID NO: 63434 - DNA, 40 bp, Homo sapiens
gacggggtttcaccatgttggccaatatggtctcaatctc

SEQ ID NO: 63435 - DNA, 40 bp, Homo sapiens
gagattgagaccatattggccaacatggtgaaaccccgtc

SEQ ID NO: 63436 - DNA, 40 bp, Homo sapiens
acggggtttcaccatgttggccaatatggtctcaatctct

SEQ ID NO: 63437 - DNA, 40 bp, Homo sapiens
agagattgagaccatattggccaacatggtgaaaccccgt

SEQ ID NO: 63438 - DNA, 40 bp, Homo sapiens
cggggtttcaccatgttggccaatatggtctcaatctctt

SEQ ID NO: 63439 - DNA, 40 bp, Homo sapiens
aagagattgagaccatattggccaacatggtgaaaccccg

SEQ ID NO: 63440 - DNA, 40 bp, Homo sapiens
ggggtttcaccatgttggccaatatggtctcaatctcttg

SEQ ID NO: 63441 - DNA, 40 bp, Homo sapiens
caagagattgagaccatattggccaacatggtgaaacccc

SEQ ID NO: 63442 - DNA, 40 bp, Homo sapiens
gggtttcaccatgttggccaatatggtctcaatctcttga

SEQ ID NO: 63443 - DNA, 40 bp, Homo sapiens
tcaagagattgagaccatattggccaacatggtgaaaccc

SEQ ID NO: 63444 - DNA, 40 bp, Homo sapiens
ggtttcaccatgttggccaatatggtctcaatctcttgac

SEQ ID NO: 63445 - DNA, 40 bp, Homo sapiens
gtcaagagattgagaccatattggccaacatggtgaaacc

SEQ ID NO: 63446 - DNA, 40 bp, Homo sapiens
gtttcaccatgttggccaatatggtctcaatctcttgacc

SEQ ID NO: 63447 - DNA, 40 bp, Homo sapiens
ggtcaagagattgagaccatattggccaacatggtgaaac

SEQ ID NO: 63448 - DNA, 40 bp, Homo sapiens
tttcaccatgttggccaatatggtctcaatctcttgacct

SEQ ID NO: 63449 - DNA, 40 bp, Homo sapiens
aggtcaagagattgagaccatattggccaacatggtgaaa

SEQ ID NO: 63450 - DNA, 40 bp, Homo sapiens
ttcaccatgttggccaatatggtctcaatctcttgacctc

SEQ ID NO: 63451 - DNA, 40 bp, Homo sapiens
gaggtcaagagattgagaccatattggccaacatggtgaa

SEQ ID NO: 63452 - DNA, 40 bp, Homo sapiens
tcaccatgttggccaatatggtctcaatctcttgacctcg

SEQ ID NO: 63453 - DNA, 40 bp, Homo sapiens
cgaggtcaagagattgagaccatattggccaacatggtga

SEQ ID NO: 63454 - DNA, 40 bp, Homo sapiens
caccatgttggccaatatggtctcaatctcttgacctcgt

SEQ ID NO: 63455 - DNA, 40 bp, Homo sapiens
acgaggtcaagagattgagaccatattggccaacatggtg

SEQ ID NO: 63456 - DNA, 40 bp, Homo sapiens
accatgttggccaatatggtctcaatctcttgacctcgtg

SEQ ID NO: 63457 - DNA, 40 bp, Homo sapiens
cacgaggtcaagagattgagaccatattggccaacatggt

SEQ ID NO: 63458 - DNA, 40 bp, Homo sapiens
ccatgttggccaatatggtctcaatctcttgacctcgtga

SEQ ID NO: 63459 - DNA, 40 bp, Homo sapiens
tcacgaggtcaagagattgagaccatattggccaacatgg

SEQ ID NO: 63460 - DNA, 40 bp, Homo sapiens
catgttggccaatatggtctcaatctcttgacctcgtgat

SEQ ID NO: 63461 - DNA, 40 bp, Homo sapiens
atcacgaggtcaagagattgagaccatattggccaacatg

SEQ ID NO: 63462 - DNA, 40 bp, Homo sapiens
atgttggccaatatggtctcaatctcttgacctcgtgatc

SEQ ID NO: 63463 - DNA, 40 bp, Homo sapiens
gatcacgaggtcaagagattgagaccatattggccaacat

SEQ ID NO: 63464 - DNA, 40 bp, Homo sapiens
tgttggccaatatggtctcaatctcttgacctcgtgatct

SEQ ID NO: 63465 - DNA, 40 bp, Homo sapiens
agatcacgaggtcaagagattgagaccatattggccaaca

SEQ ID NO: 63466 - DNA, 40 bp, Homo sapiens
gttggccaatatggtctcaatctcttgacctcgtgatctg

SEQ ID NO: 63467 - DNA, 40 bp, Homo sapiens
cagatcacgaggtcaagagattgagaccatattggccaac

SEQ ID NO: 63468 - DNA, 40 bp, Homo sapiens
ttggccaatatggtctcaatctcttgacctcgtgatctgc

SEQ ID NO: 63469 - DNA, 40 bp, Homo sapiens
gcagatcacgaggtcaagagattgagaccatattggccaa

SEQ ID NO: 63470 - DNA, 40 bp, Homo sapiens
tggccaatatggtctcaatctcttgacctcgtgatctgcc

SEQ ID NO: 63471 - DNA, 40 bp, Homo sapiens
ggcagatcacgaggtcaagagattgagaccatattggcca

SEQ ID NO: 63472 - DNA, 40 bp, Homo sapiens
ggccaatatggtctcaatctcttgacctcgtgatctgccc

SEQ ID NO: 63473 - DNA, 40 bp, Homo sapiens
gggcagatcacgaggtcaagagattgagaccatattggcc

SEQ ID NO: 63474 - DNA, 40 bp, Homo sapiens
gccaatatggtctcaatctcttgacctcgtgatctgcccg

SEQ ID NO: 63475 - DNA, 40 bp, Homo sapiens
cgggcagatcacgaggtcaagagattgagaccatattggc

SEQ ID NO: 63476 - DNA, 40 bp, Homo sapiens
ccaatatggtctcaatctcttgacctcgtgatctgcccgt

SEQ ID NO: 63477 - DNA, 40 bp, Homo sapiens
acgggcagatcacgaggtcaagagattgagaccatattgg

SEQ ID NO: 63478 - DNA, 40 bp, Homo sapiens
caatatggtctcaatctcttgacctcgtgatctgcccgtc

SEQ ID NO: 63479 - DNA, 40 bp, Homo sapiens
gacgggcagatcacgaggtcaagagattgagaccatattg

SEQ ID NO: 63480 - DNA, 40 bp, Homo sapiens
aatatggtctcaatctcttgacctcgtgatctgcccgtct

SEQ ID NO: 63481 - DNA, 40 bp, Homo sapiens
agacgggcagatcacgaggtcaagagattgagaccatatt

SEQ ID NO: 63482 - DNA, 40 bp, Homo sapiens
atatggtctcaatctcttgacctcgtgatctgcccgtctc

SEQ ID NO: 63483 - DNA, 40 bp, Homo sapiens
gagacgggcagatcacgaggtcaagagattgagaccatat

SEQ ID NO: 63484 - DNA, 40 bp, Homo sapiens
tatggtctcaatctcttgacctcgtgatctgcccgtctcg

SEQ ID NO: 63485 - DNA, 40 bp, Homo sapiens
cgagacgggcagatcacgaggtcaagagattgagaccata

SEQ ID NO: 63486 - DNA, 40 bp, Homo sapiens
atggtctcaatctcttgacctcgtgatctgcccgtctcgg

SEQ ID NO: 63487 - DNA, 40 bp, Homo sapiens
ccgagacgggcagatcacgaggtcaagagattgagaccat

SEQ ID NO: 63488 - DNA, 40 bp, Homo sapiens
tggtctcaatctcttgacctcgtgatctgcccgtctcggc

SEQ ID NO: 63489 - DNA, 40 bp, Homo sapiens
gccgagacgggcagatcacgaggtcaagagattgagacca

SEQ ID NO: 63490 - DNA, 40 bp, Homo sapiens
ggtctcaatctcttgacctcgtgatctgcccgtctcggcc

SEQ ID NO: 63491 - DNA, 40 bp, Homo sapiens
ggccgagacgggcagatcacgaggtcaagagattgagacc

SEQ ID NO: 63492 - DNA, 40 bp, Homo sapiens
gtctcaatctcttgacctcgtgatctgcccgtctcggcct

SEQ ID NO: 63493 - DNA, 40 bp, Homo sapiens
aggccgagacgggcagatcacgaggtcaagagattgagac

SEQ ID NO: 63494 - DNA, 40 bp, Homo sapiens
tctcaatctcttgacctcgtgatctgcccgtctcggcctc

SEQ ID NO: 63495 - DNA, 40 bp, Homo sapiens
gaggccgagacgggcagatcacgaggtcaagagattgaga

SEQ ID NO: 63496 - DNA, 40 bp, Homo sapiens
ctcaatctcttgacctcgtgatctgcccgtctcggcctcc

SEQ ID NO: 63497 - DNA, 40 bp, Homo sapiens
ggaggccgagacgggcagatcacgaggtcaagagattgag

SEQ ID NO: 63498 - DNA, 40 bp, Homo sapiens
tcaatctcttgacctcgtgatctgcccgtctcggcctccc

SEQ ID NO: 63499 - DNA, 40 bp, Homo sapiens
gggaggccgagacgggcagatcacgaggtcaagagattga

SEQ ID NO: 63500 - DNA, 40 bp, Homo sapiens
caatctcttgacctcgtgatctgcccgtctcggcctccca

SEQ ID NO: 63501 - DNA, 40 bp, Homo sapiens
tgggaggccgagacgggcagatcacgaggtcaagagattg

SEQ ID NO: 63502 - DNA, 40 bp, Homo sapiens
aatctcttgacctcgtgatctgcccgtctcggcctcccaa

SEQ ID NO: 63503 - DNA, 40 bp, Homo sapiens
ttgggaggccgagacgggcagatcacgaggtcaagagatt

SEQ ID NO: 63504 - DNA, 40 bp, Homo sapiens
atctcttgacctcgtgatctgcccgtctcggcctcccaaa

SEQ ID NO: 63505 - DNA, 40 bp, Homo sapiens
tttgggaggccgagacgggcagatcacgaggtcaagagat

SEQ ID NO: 63506 - DNA, 40 bp, Homo sapiens
tctcttgacctcgtgatctgcccgtctcggcctcccaaag

SEQ ID NO: 63507 - DNA, 40 bp, Homo sapiens
ctttgggaggccgagacgggcagatcacgaggtcaagaga

SEQ ID NO: 63508 - DNA, 40 bp, Homo sapiens
ctcttgacctcgtgatctgcccgtctcggcctcccaaagt

SEQ ID NO: 63509 - DNA, 40 bp, Homo sapiens
actttgggaggccgagacgggcagatcacgaggtcaagag

SEQ ID NO: 63510 - DNA, 40 bp, Homo sapiens
tcttgacctcgtgatctgcccgtctcggcctcccaaagtg

SEQ ID NO: 63511 - DNA, 40 bp, Homo sapiens
cactttgggaggccgagacgggcagatcacgaggtcaaga

SEQ ID NO: 63512 - DNA, 40 bp, Homo sapiens
cttgacctcgtgatctgcccgtctcggcctcccaaagtgc

SEQ ID NO: 63513 - DNA, 40 bp, Homo sapiens
gcactttgggaggccgagacgggcagatcacgaggtcaag

SEQ ID NO: 63514 - DNA, 40 bp, Homo sapiens
ttgacctcgtgatctgcccgtctcggcctcccaaagtgct

SEQ ID NO: 63515 - DNA, 40 bp, Homo sapiens
agcactttgggaggccgagacgggcagatcacgaggtcaa

SEQ ID NO: 63516 - DNA, 40 bp, Homo sapiens
tgacctcgtgatctgcccgtctcggcctcccaaagtgctg

SEQ ID NO: 63517 - DNA, 40 bp, Homo sapiens
cagcactttgggaggccgagacgggcagatcacgaggtca

SEQ ID NO: 63518 - DNA, 40 bp, Homo sapiens
gacctcgtgatctgcccgtctcggcctcccaaagtgctgg

SEQ ID NO: 63519 - DNA, 40 bp, Homo sapiens
ccagcactttgggaggccgagacgggcagatcacgaggtc

SEQ ID NO: 63520 - DNA, 40 bp, Homo sapiens
acctcgtgatctgcccgtctcggcctcccaaagtgctggg

SEQ ID NO: 63521 - DNA, 40 bp, Homo sapiens
cccagcactttgggaggccgagacgggcagatcacgaggt

SEQ ID NO: 63522 - DNA, 40 bp, Homo sapiens
cctcgtgatctgcccgtctcggcctcccaaagtgctggga

SEQ ID NO: 63523 - DNA, 40 bp, Homo sapiens
tcccagcactttgggaggccgagacgggcagatcacgagg

SEQ ID NO: 63524 - DNA, 40 bp, Homo sapiens
ctcgtgatctgcccgtctcggcctcccaaagtgctgggat

SEQ ID NO: 63525 - DNA, 40 bp, Homo sapiens
atcccagcactttgggaggccgagacgggcagatcacgag

SEQ ID NO: 63526 - DNA, 40 bp, Homo sapiens
tcgtgatctgcccgtctcggcctcccaaagtgctgggatt

SEQ ID NO: 63527 - DNA, 40 bp, Homo sapiens
aatcccagcactttgggaggccgagacgggcagatcacga

SEQ ID NO: 63528 - DNA, 40 bp, Homo sapiens
cgtgatctgcccgtctcggcctcccaaagtgctgggatta

SEQ ID NO: 63529 - DNA, 40 bp, Homo sapiens
taatcccagcactttgggaggccgagacgggcagatcacg

SEQ ID NO: 63530 - DNA, 40 bp, Homo sapiens
gtgatctgcccgtctcggcctcccaaagtgctgggattac

SEQ ID NO: 63531 - DNA, 40 bp, Homo sapiens
gtaatcccagcactttgggaggccgagacgggcagatcac

SEQ ID NO: 63532 - DNA, 40 bp, Homo sapiens
tgatctgcccgtctcggcctcccaaagtgctgggattaca

SEQ ID NO: 63533 - DNA, 40 bp, Homo sapiens
tgtaatcccagcactttgggaggccgagacgggcagatca

SEQ ID NO: 63534 - DNA, 40 bp, Homo sapiens
gatctgcccgtctcggcctcccaaagtgctgggattacag

SEQ ID NO: 63535 - DNA, 40 bp, Homo sapiens
ctgtaatcccagcactttgggaggccgagacgggcagatc

SEQ ID NO: 63536 - DNA, 40 bp, Homo sapiens
atctgcccgtctcggcctcccaaagtgctgggattacagg

SEQ ID NO: 63537 - DNA, 40 bp, Homo sapiens
cctgtaatcccagcactttgggaggccgagacgggcagat

SEQ ID NO: 63538 - DNA, 40 bp, Homo sapiens
tctgcccgtctcggcctcccaaagtgctgggattacaggc

SEQ ID NO: 63539 - DNA, 40 bp, Homo sapiens
gcctgtaatcccagcactttgggaggccgagacgggcaga

SEQ ID NO: 63540 - DNA, 40 bp, Homo sapiens
ctgcccgtctcggcctcccaaagtgctgggattacaggcg

SEQ ID NO: 63541 - DNA, 40 bp, Homo sapiens
cgcctgtaatcccagcactttgggaggccgagacgggcag

SEQ ID NO: 63542 - DNA, 40 bp, Homo sapiens
tgcccgtctcggcctcccaaagtgctgggattacaggcgt

SEQ ID NO: 63543 - DNA, 40 bp, Homo sapiens
acgcctgtaatcccagcactttgggaggccgagacgggca

SEQ ID NO: 63544 - DNA, 40 bp, Homo sapiens
gcccgtctcggcctcccaaagtgctgggattacaggcgtg

SEQ ID NO: 63545 - DNA, 40 bp, Homo sapiens
cacgcctgtaatcccagcactttgggaggccgagacgggc

SEQ ID NO: 63546 - DNA, 40 bp, Homo sapiens
cccgtctcggcctcccaaagtgctgggattacaggcgtga

SEQ ID NO: 63547 - DNA, 40 bp, Homo sapiens
tcacgcctgtaatcccagcactttgggaggccgagacggg

SEQ ID NO: 63548 - DNA, 40 bp, Homo sapiens
ccgtctcggcctcccaaagtgctgggattacaggcgtgag

SEQ ID NO: 63549 - DNA, 40 bp, Homo sapiens
ctcacgcctgtaatcccagcactttgggaggccgagacgg

SEQ ID NO: 63550 - DNA, 40 bp, Homo sapiens
cgtctcggcctcccaaagtgctgggattacaggcgtgagc

SEQ ID NO: 63551 - DNA, 40 bp, Homo sapiens
gctcacgcctgtaatcccagcactttgggaggccgagacg

SEQ ID NO: 63552 - DNA, 40 bp, Homo sapiens
gtctcggcctcccaaagtgctgggattacaggcgtgagcc

SEQ ID NO: 63553 - DNA, 40 bp, Homo sapiens
ggctcacgcctgtaatcccagcactttgggaggccgagac

SEQ ID NO: 63554 - DNA, 40 bp, Homo sapiens
tctcggcctcccaaagtgctgggattacaggcgtgagcca

SEQ ID NO: 63555 - DNA, 40 bp, Homo sapiens
tggctcacgcctgtaatcccagcactttgggaggccgaga

SEQ ID NO: 63556 - DNA, 40 bp, Homo sapiens
ctcggcctcccaaagtgctgggattacaggcgtgagccac

SEQ ID NO: 63557 - DNA, 40 bp, Homo sapiens
gtggctcacgcctgtaatcccagcactttgggaggccgag

SEQ ID NO: 63558 - DNA, 40 bp, Homo sapiens
tcggcctcccaaagtgctgggattacaggcgtgagccact

SEQ ID NO: 63559 - DNA, 40 bp, Homo sapiens
agtggctcacgcctgtaatcccagcactttgggaggccga

SEQ ID NO: 63560 - DNA, 40 bp, Homo sapiens
cggcctcccaaagtgctgggattacaggcgtgagccactg

SEQ ID NO: 63561 - DNA, 40 bp, Homo sapiens
cagtggctcacgcctgtaatcccagcactttgggaggccg

SEQ ID NO: 63562 - DNA, 40 bp, Homo sapiens
ggcctcccaaagtgctgggattacaggcgtgagccactgt

SEQ ID NO: 63563 - DNA, 40 bp, Homo sapiens
acagtggctcacgcctgtaatcccagcactttgggaggcc

SEQ ID NO: 63564 - DNA, 40 bp, Homo sapiens
gcctcccaaagtgctgggattacaggcgtgagccactgtg

SEQ ID NO: 63565 - DNA, 40 bp, Homo sapiens
cacagtggctcacgcctgtaatcccagcactttgggaggc

SEQ ID NO: 63566 - DNA, 40 bp, Homo sapiens
cctcccaaagtgctgggattacaggcgtgagccactgtgc

SEQ ID NO: 63567 - DNA, 40 bp, Homo sapiens
gcacagtggctcacgcctgtaatcccagcactttgggagg

SEQ ID NO: 63568 - DNA, 40 bp, Homo sapiens
ctcccaaagtgctgggattacaggcgtgagccactgtgcc

SEQ ID NO: 63569 - DNA, 40 bp, Homo sapiens
ggcacagtggctcacgcctgtaatcccagcactttgggag

SEQ ID NO: 63570 - DNA, 40 bp, Homo sapiens
tcccaaagtgctgggattacaggcgtgagccactgtgccc

SEQ ID NO: 63571 - DNA, 40 bp, Homo sapiens
gggcacagtggctcacgcctgtaatcccagcactttggga

SEQ ID NO: 63572 - DNA, 40 bp, Homo sapiens
cccaaagtgctgggattacaggcgtgagccactgtgccca

SEQ ID NO: 63573 - DNA, 40 bp, Homo sapiens
tgggcacagtggctcacgcctgtaatcccagcactttggg

SEQ ID NO: 63574 - DNA, 40 bp, Homo sapiens
ccaaagtgctgggattacaggcgtgagccactgtgcccag

SEQ ID NO: 63575 - DNA, 40 bp, Homo sapiens
ctgggcacagtggctcacgcctgtaatcccagcactttgg

SEQ ID NO: 63576 - DNA, 40 bp, Homo sapiens
caaagtgctgggattacaggcgtgagccactgtgcccagc

SEQ ID NO: 63577 - DNA, 40 bp, Homo sapiens
gctgggcacagtggctcacgcctgtaatcccagcactttg

SEQ ID NO: 63578 - DNA, 40 bp, Homo sapiens
aaagtgctgggattacaggcgtgagccactgtgcccagct

SEQ ID NO: 63579 - DNA, 40 bp, Homo sapiens
agctgggcacagtggctcacgcctgtaatcccagcacttt

SEQ ID NO: 63580 - DNA, 40 bp, Homo sapiens
aagtgctgggattacaggcgtgagccactgtgcccagctg

SEQ ID NO: 63581 - DNA, 40 bp, Homo sapiens
cagctgggcacagtggctcacgcctgtaatcccagcactt

SEQ ID NO: 63582 - DNA, 40 bp, Homo sapiens
agtgctgggattacaggcgtgagccactgtgcccagctgt

SEQ ID NO: 63583 - DNA, 40 bp, Homo sapiens
acagctgggcacagtggctcacgcctgtaatcccagcact

SEQ ID NO: 63584 - DNA, 40 bp, Homo sapiens
gtgctgggattacaggcgtgagccactgtgcccagctgta

SEQ ID NO: 63585 - DNA, 40 bp, Homo sapiens
tacagctgggcacagtggctcacgcctgtaatcccagcac

SEQ ID NO: 63586 - DNA, 40 bp, Homo sapiens
tgctgggattacaggcgtgagccactgtgcccagctgtac

SEQ ID NO: 63587 - DNA, 40 bp, Homo sapiens
gtacagctgggcacagtggctcacgcctgtaatcccagca

SEQ ID NO: 63588 - DNA, 40 bp, Homo sapiens
gctgggattacaggcgtgagccactgtgcccagctgtact

SEQ ID NO: 63589 - DNA, 40 bp, Homo sapiens
agtacagctgggcacagtggctcacgcctgtaatcccagc

SEQ ID NO: 63590 - DNA, 40 bp, Homo sapiens
ctgggattacaggcgtgagccactgtgcccagctgtactt

SEQ ID NO: 63591 - DNA, 40 bp, Homo sapiens
aagtacagctgggcacagtggctcacgcctgtaatcccag

SEQ ID NO: 63592 - DNA, 40 bp, Homo sapiens
tgggattacaggcgtgagccactgtgcccagctgtacttt

SEQ ID NO: 63593 - DNA, 40 bp, Homo sapiens
aaagtacagctgggcacagtggctcacgcctgtaatccca

SEQ ID NO: 63594 - DNA, 40 bp, Homo sapiens
gggattacaggcgtgagccactgtgcccagctgtactttt

SEQ ID NO: 63595 - DNA, 40 bp, Homo sapiens
aaaagtacagctgggcacagtggctcacgcctgtaatccc

SEQ ID NO: 63596 - DNA, 40 bp, Homo sapiens
ggattacaggcgtgagccactgtgcccagctgtacttttt

SEQ ID NO: 63597 - DNA, 40 bp, Homo sapiens
aaaaagtacagctgggcacagtggctcacgcctgtaatcc

SEQ ID NO: 63598 - DNA, 40 bp, Homo sapiens
gattacaggcgtgagccactgtgcccagctgtacttttta

SEQ ID NO: 63599 - DNA, 40 bp, Homo sapiens
taaaaagtacagctgggcacagtggctcacgcctgtaatc

SEQ ID NO: 63600 - DNA, 40 bp, Homo sapiens
attacaggcgtgagccactgtgcccagctgtactttttaa

SEQ ID NO: 63601 - DNA, 40 bp, Homo sapiens
ttaaaaagtacagctgggcacagtggctcacgcctgtaat

SEQ ID NO: 63602 - DNA, 40 bp, Homo sapiens
ttacaggcgtgagccactgtgcccagctgtactttttaag

SEQ ID NO: 63603 - DNA, 40 bp, Homo sapiens
cttaaaaagtacagctgggcacagtggctcacgcctgtaa

SEQ ID NO: 63604 - DNA, 40 bp, Homo sapiens
tacaggcgtgagccactgtgcccagctgtactttttaaga

SEQ ID NO: 63605 - DNA, 40 bp, Homo sapiens
tcttaaaaagtacagctgggcacagtggctcacgcctgta

SEQ ID NO: 63606 - DNA, 40 bp, Homo sapiens
acaggcgtgagccactgtgcccagctgtactttttaagat

SEQ ID NO: 63607 - DNA, 40 bp, Homo sapiens
atcttaaaaagtacagctgggcacagtggctcacgcctgt

SEQ ID NO: 63608 - DNA, 40 bp, Homo sapiens
caggcgtgagccactgtgcccagctgtactttttaagata

SEQ ID NO: 63609 - DNA, 40 bp, Homo sapiens
tatcttaaaaagtacagctgggcacagtggctcacgcctg

SEQ ID NO: 63610 - DNA, 40 bp, Homo sapiens
aggcgtgagccactgtgcccagctgtactttttaagataa

SEQ ID NO: 63611 - DNA, 40 bp, Homo sapiens
ttatcttaaaaagtacagctgggcacagtggctcacgcct

SEQ ID NO: 63612 - DNA, 40 bp, Homo sapiens
ggcgtgagccactgtgcccagctgtactttttaagataag

SEQ ID NO: 63613 - DNA, 40 bp, Homo sapiens
cttatcttaaaaagtacagctgggcacagtggctcacgcc

SEQ ID NO: 63614 - DNA, 40 bp, Homo sapiens
gcgtgagccactgtgcccagctgtactttttaagataaga

SEQ ID NO: 63615 - DNA, 40 bp, Homo sapiens
tcttatcttaaaaagtacagctgggcacagtggctcacgc

SEQ ID NO: 63616 - DNA, 40 bp, Homo sapiens
cgtgagccactgtgcccagctgtactttttaagataagaa

SEQ ID NO: 63617 - DNA, 40 bp, Homo sapiens
ttcttatcttaaaaagtacagctgggcacagtggctcacg

SEQ ID NO: 63618 - DNA, 40 bp, Homo sapiens
gtgagccactgtgcccagctgtactttttaagataagaat

SEQ ID NO: 63619 - DNA, 40 bp, Homo sapiens
attcttatcttaaaaagtacagctgggcacagtggctcac

SEQ ID NO: 63620 - DNA, 40 bp, Homo sapiens
tgagccactgtgcccagctgtactttttaagataagaatt

SEQ ID NO: 63621 - DNA, 40 bp, Homo sapiens
aattcttatcttaaaaagtacagctgggcacagtggctca

SEQ ID NO: 63622 - DNA, 40 bp, Homo sapiens
gagccactgtgcccagctgtactttttaagataagaattg

SEQ ID NO: 63623 - DNA, 40 bp, Homo sapiens
caattcttatcttaaaaagtacagctgggcacagtggctc

SEQ ID NO: 63624 - DNA, 40 bp, Homo sapiens
agccactgtgcccagctgtactttttaagataagaattgc

SEQ ID NO: 63625 - DNA, 40 bp, Homo sapiens
gcaattcttatcttaaaaagtacagctgggcacagtggct

SEQ ID NO: 63626 - DNA, 40 bp, Homo sapiens
gccactgtgcccagctgtactttttaagataagaattgca

SEQ ID NO: 63627 - DNA, 40 bp, Homo sapiens
tgcaattcttatcttaaaaagtacagctgggcacagtggc

SEQ ID NO: 63628 - DNA, 40 bp, Homo sapiens
ccactgtgcccagctgtactttttaagataagaattgcag

SEQ ID NO: 63629 - DNA, 40 bp, Homo sapiens
ctgcaattcttatcttaaaaagtacagctgggcacagtgg

SEQ ID NO: 63630 - DNA, 40 bp, Homo sapiens
cactgtgcccagctgtactttttaagataagaattgcagg

SEQ ID NO: 63631 - DNA, 40 bp, Homo sapiens
cctgcaattcttatcttaaaaagtacagctgggcacagtg

SEQ ID NO: 63632 - DNA, 40 bp, Homo sapiens
actgtgcccagctgtactttttaagataagaattgcaggg

SEQ ID NO: 63633 - DNA, 40 bp, Homo sapiens
ccctgcaattcttatcttaaaaagtacagctgggcacagt

SEQ ID NO: 63634 - DNA, 40 bp, Homo sapiens
ctgtgcccagctgtactttttaagataagaattgcagggt

SEQ ID NO: 63635 - DNA, 40 bp, Homo sapiens
accctgcaattcttatcttaaaaagtacagctgggcacag

SEQ ID NO: 63636 - DNA, 40 bp, Homo sapiens
tgtgcccagctgtactttttaagataagaattgcagggta

SEQ ID NO: 63637 - DNA, 40 bp, Homo sapiens
taccctgcaattcttatcttaaaaagtacagctgggcaca

SEQ ID NO: 63638 - DNA, 40 bp, Homo sapiens
gtgcccagctgtactttttaagataagaattgcagggtat

SEQ ID NO: 63639 - DNA, 40 bp, Homo sapiens
ataccctgcaattcttatcttaaaaagtacagctgggcac

SEQ ID NO: 63640 - DNA, 40 bp, Homo sapiens
tgcccagctgtactttttaagataagaattgcagggtata

SEQ ID NO: 63641 - DNA, 40 bp, Homo sapiens
tataccctgcaattcttatcttaaaaagtacagctgggca

SEQ ID NO: 63642 - DNA, 40 bp, Homo sapiens
gcccagctgtactttttaagataagaattgcagggtatat

SEQ ID NO: 63643 - DNA, 40 bp, Homo sapiens
atataccctgcaattcttatcttaaaaagtacagctgggc

SEQ ID NO: 63644 - DNA, 40 bp, Homo sapiens
cccagctgtactttttaagataagaattgcagggtatata

SEQ ID NO: 63645 - DNA, 40 bp, Homo sapiens
tatataccctgcaattcttatcttaaaaagtacagctggg

SEQ ID NO: 63646 - DNA, 40 bp, Homo sapiens
ccagctgtactttttaagataagaattgcagggtatatat

SEQ ID NO: 63647 - DNA, 40 bp, Homo sapiens
atatataccctgcaattcttatcttaaaaagtacagctgg

SEQ ID NO: 63648 - DNA, 40 bp, Homo sapiens
cagctgtactttttaagataagaattgcagggtatatatt

SEQ ID NO: 63649 - DNA, 40 bp, Homo sapiens
aatatataccctgcaattcttatcttaaaaagtacagctg

SEQ ID NO: 63650 - DNA, 40 bp, Homo sapiens
agctgtactttttaagataagaattgcagggtatatattt

SEQ ID NO: 63651 - DNA, 40 bp, Homo sapiens
aaatatataccctgcaattcttatcttaaaaagtacagct

SEQ ID NO: 63652 - DNA, 40 bp, Homo sapiens
gctgtactttttaagataagaattgcagggtatatatttt

SEQ ID NO: 63653 - DNA, 40 bp, Homo sapiens
aaaatatataccctgcaattcttatcttaaaaagtacagc

SEQ ID NO: 63654 - DNA, 40 bp, Homo sapiens
ctgtactttttaagataagaattgcagggtatatattttt

SEQ ID NO: 63655 - DNA, 40 bp, Homo sapiens
aaaaatatataccctgcaattcttatcttaaaaagtacag

SEQ ID NO: 63656 - DNA, 40 bp, Homo sapiens
tgtactttttaagataagaattgcagggtatatattttta

SEQ ID NO: 63657 - DNA, 40 bp, Homo sapiens
taaaaatatataccctgcaattcttatcttaaaaagtaca

SEQ ID NO: 63658 - DNA, 40 bp, Homo sapiens
gtactttttaagataagaattgcagggtatatatttttac

SEQ ID NO: 63659 - DNA, 40 bp, Homo sapiens
gtaaaaatatataccctgcaattcttatcttaaaaagtac

SEQ ID NO: 63660 - DNA, 40 bp, Homo sapiens
tactttttaagataagaattgcagggtatatatttttacc

SEQ ID NO: 63661 - DNA, 40 bp, Homo sapiens
ggtaaaaatatataccctgcaattcttatcttaaaaagta

SEQ ID NO: 63662 - DNA, 40 bp, Homo sapiens
actttttaagataagaattgcagggtatatatttttacca

SEQ ID NO: 63663 - DNA, 40 bp, Homo sapiens
tggtaaaaatatataccctgcaattcttatcttaaaaagt

SEQ ID NO: 63664 - DNA, 40 bp, Homo sapiens
ctttttaagataagaattgcagggtatatatttttaccaa

SEQ ID NO: 63665 - DNA, 40 bp, Homo sapiens
ttggtaaaaatatataccctgcaattcttatcttaaaaag

SEQ ID NO: 63666 - DNA, 40 bp, Homo sapiens
tttttaagataagaattgcagggtatatatttttaccaac

SEQ ID NO: 63667 - DNA, 40 bp, Homo sapiens
gttggtaaaaatatataccctgcaattcttatcttaaaaa

SEQ ID NO: 63668 - DNA, 40 bp, Homo sapiens
ttttaagataagaattgcagggtatatatttttaccaact

SEQ ID NO: 63669 - DNA, 40 bp, Homo sapiens
agttggtaaaaatatataccctgcaattcttatcttaaaa

SEQ ID NO: 63670 - DNA, 40 bp, Homo sapiens
tttaagataagaattgcagggtatatatttttaccaactt

SEQ ID NO: 63671 - DNA, 40 bp, Homo sapiens
aagttggtaaaaatatataccctgcaattcttatcttaaa

SEQ ID NO: 63672 - DNA, 40 bp, Homo sapiens
ttaagataagaattgcagggtatatatttttaccaactta

SEQ ID NO: 63673 - DNA, 40 bp, Homo sapiens
taagttggtaaaaatatataccctgcaattcttatcttaa

SEQ ID NO: 63674 - DNA, 40 bp, Homo sapiens
taagataagaattgcagggtatatatttttaccaacttaa

SEQ ID NO: 63675 - DNA, 40 bp, Homo sapiens
ttaagttggtaaaaatatataccctgcaattcttatctta

SEQ ID NO: 63676 - DNA, 40 bp, Homo sapiens
aagataagaattgcagggtatatatttttaccaacttaat

SEQ ID NO: 63677 - DNA, 40 bp, Homo sapiens
attaagttggtaaaaatatataccctgcaattcttatctt

SEQ ID NO: 63678 - DNA, 40 bp, Homo sapiens
agataagaattgcagggtatatatttttaccaacttaata

SEQ ID NO: 63679 - DNA, 40 bp, Homo sapiens
tattaagttggtaaaaatatataccctgcaattcttatct

SEQ ID NO: 63680 - DNA, 40 bp, Homo sapiens
gataagaattgcagggtatatatttttaccaacttaataa

SEQ ID NO: 63681 - DNA, 40 bp, Homo sapiens
ttattaagttggtaaaaatatataccctgcaattcttatc

SEQ ID NO: 63682 - DNA, 40 bp, Homo sapiens
ataagaattgcagggtatatatttttaccaacttaataac

SEQ ID NO: 63683 - DNA, 40 bp, Homo sapiens
gttattaagttggtaaaaatatataccctgcaattcttat

SEQ ID NO: 63684 - DNA, 40 bp, Homo sapiens
taagaattgcagggtatatatttttaccaacttaataact

SEQ ID NO: 63685 - DNA, 40 bp, Homo sapiens
agttattaagttggtaaaaatatataccctgcaattctta

SEQ ID NO: 63686 - DNA, 40 bp, Homo sapiens
aagaattgcagggtatatatttttaccaacttaataactt

SEQ ID NO: 63687 - DNA, 40 bp, Homo sapiens
aagttattaagttggtaaaaatatataccctgcaattctt

SEQ ID NO: 63688 - DNA, 40 bp, Homo sapiens
agaattgcagggtatatatttttaccaacttaataactta

SEQ ID NO: 63689 - DNA, 40 bp, Homo sapiens
taagttattaagttggtaaaaatatataccctgcaattct

SEQ ID NO: 63690 - DNA, 40 bp, Homo sapiens
gaattgcagggtatatatttttaccaacttaataacttat

SEQ ID NO: 63691 - DNA, 40 bp, Homo sapiens
ataagttattaagttggtaaaaatatataccctgcaattc

SEQ ID NO: 63692 - DNA, 40 bp, Homo sapiens
aattgcagggtatatatttttaccaacttaataacttata

SEQ ID NO: 63693 - DNA, 40 bp, Homo sapiens
tataagttattaagttggtaaaaatatataccctgcaatt

SEQ ID NO: 63694 - DNA, 40 bp, Homo sapiens
attgcagggtatatatttttaccaacttaataacttataa

SEQ ID NO: 63695 - DNA, 40 bp, Homo sapiens
ttataagttattaagttggtaaaaatatataccctgcaat

SEQ ID NO: 63696 - DNA, 40 bp, Homo sapiens
ttgcagggtatatatttttaccaacttaataacttataat

SEQ ID NO: 63697 - DNA, 40 bp, Homo sapiens
attataagttattaagttggtaaaaatatataccctgcaa

SEQ ID NO: 63698 - DNA, 40 bp, Homo sapiens
tgcagggtatatatttttaccaacttaataacttataatt

SEQ ID NO: 63699 - DNA, 40 bp, Homo sapiens
aattataagttattaagttggtaaaaatatataccctgca

SEQ ID NO: 63700 - DNA, 40 bp, Homo sapiens
gcagggtatatatttttaccaacttaataacttataattt

SEQ ID NO: 63701 - DNA, 40 bp, Homo sapiens
aaattataagttattaagttggtaaaaatatataccctgc

SEQ ID NO: 63702 - DNA, 40 bp, Homo sapiens
cagggtatatatttttaccaacttaataacttataatttt

SEQ ID NO: 63703 - DNA, 40 bp, Homo sapiens
aaaattataagttattaagttggtaaaaatatataccctg

SEQ ID NO: 63704 - DNA, 40 bp, Homo sapiens
agggtatatatttttaccaacttaataacttataatttta

SEQ ID NO: 63705 - DNA, 40 bp, Homo sapiens
taaaattataagttattaagttggtaaaaatatataccct

SEQ ID NO: 63706 - DNA, 40 bp, Homo sapiens
gggtatatatttttaccaacttaataacttataattttaa

SEQ ID NO: 63707 - DNA, 40 bp, Homo sapiens
ttaaaattataagttattaagttggtaaaaatatataccc

SEQ ID NO: 63708 - DNA, 40 bp, Homo sapiens
ggtatatatttttaccaacttaataacttataattttaaa

SEQ ID NO: 63709 - DNA, 40 bp, Homo sapiens
tttaaaattataagttattaagttggtaaaaatatatacc

SEQ ID NO: 63710 - DNA, 40 bp, Homo sapiens
gtatatatttttaccaacttaataacttataattttaaaa

SEQ ID NO: 63711 - DNA, 40 bp, Homo sapiens
ttttaaaattataagttattaagttggtaaaaatatatac

SEQ ID NO: 63712 - DNA, 40 bp, Homo sapiens
tatatatttttaccaacttaataacttataattttaaaaa

SEQ ID NO: 63713 - DNA, 40 bp, Homo sapiens
tttttaaaattataagttattaagttggtaaaaatatata

SEQ ID NO: 63714 - DNA, 40 bp, Homo sapiens
atatatttttaccaacttaataacttataattttaaaaag

SEQ ID NO: 63715 - DNA, 40 bp, Homo sapiens
ctttttaaaattataagttattaagttggtaaaaatatat

SEQ ID NO: 63716 - DNA, 40 bp, Homo sapiens
tatatttttaccaacttaataacttataattttaaaaagc

SEQ ID NO: 63717 - DNA, 40 bp, Homo sapiens
gctttttaaaattataagttattaagttggtaaaaatata

SEQ ID NO: 63718 - DNA, 40 bp, Homo sapiens
atatttttaccaacttaataacttataattttaaaaagct

SEQ ID NO: 63719 - DNA, 40 bp, Homo sapiens
agctttttaaaattataagttattaagttggtaaaaatat

SEQ ID NO: 63720 - DNA, 40 bp, Homo sapiens
tatttttaccaacttaataacttataattttaaaaagcta

SEQ ID NO: 63721 - DNA, 40 bp, Homo sapiens
tagctttttaaaattataagttattaagttggtaaaaata

SEQ ID NO: 63722 - DNA, 40 bp, Homo sapiens
atttttaccaacttaataacttataattttaaaaagctaa

SEQ ID NO: 63723 - DNA, 40 bp, Homo sapiens
ttagctttttaaaattataagttattaagttggtaaaaat

SEQ ID NO: 63724 - DNA, 40 bp, Homo sapiens
tttttaccaacttaataacttataattttaaaaagctaat

SEQ ID NO: 63725 - DNA, 40 bp, Homo sapiens
attagctttttaaaattataagttattaagttggtaaaaa

SEQ ID NO: 63726 - DNA, 40 bp, Homo sapiens
ttttaccaacttaataacttataattttaaaaagctaatt

SEQ ID NO: 63727 - DNA, 40 bp, Homo sapiens
aattagctttttaaaattataagttattaagttggtaaaa

SEQ ID NO: 63728 - DNA, 40 bp, Homo sapiens
tttaccaacttaataacttataattttaaaaagctaatta

SEQ ID NO: 63729 - DNA, 40 bp, Homo sapiens
taattagctttttaaaattataagttattaagttggtaaa

SEQ ID NO: 63730 - DNA, 40 bp, Homo sapiens
ttaccaacttaataacttataattttaaaaagctaattac

SEQ ID NO: 63731 - DNA, 40 bp, Homo sapiens
gtaattagctttttaaaattataagttattaagttggtaa

SEQ ID NO: 63732 - DNA, 40 bp, Homo sapiens
taccaacttaataacttataattttaaaaagctaattact

SEQ ID NO: 63733 - DNA, 40 bp, Homo sapiens
agtaattagctttttaaaattataagttattaagttggta

SEQ ID NO: 63734 - DNA, 40 bp, Homo sapiens
accaacttaataacttataattttaaaaagctaattactt

SEQ ID NO: 63735 - DNA, 40 bp, Homo sapiens
aagtaattagctttttaaaattataagttattaagttggt

SEQ ID NO: 63736 - DNA, 40 bp, Homo sapiens
ccaacttaataacttataattttaaaaagctaattacttg

SEQ ID NO: 63737 - DNA, 40 bp, Homo sapiens
caagtaattagctttttaaaattataagttattaagttgg

SEQ ID NO: 63738 - DNA, 40 bp, Homo sapiens
caacttaataacttataattttaaaaagctaattacttgg

SEQ ID NO: 63739 - DNA, 40 bp, Homo sapiens
ccaagtaattagctttttaaaattataagttattaagttg

SEQ ID NO: 63740 - DNA, 40 bp, Homo sapiens
aacttaataacttataattttaaaaagctaattacttggc

SEQ ID NO: 63741 - DNA, 40 bp, Homo sapiens
gccaagtaattagctttttaaaattataagttattaagtt

SEQ ID NO: 63742 - DNA, 40 bp, Homo sapiens
acttaataacttataattttaaaaagctaattacttggct

SEQ ID NO: 63743 - DNA, 40 bp, Homo sapiens
agccaagtaattagctttttaaaattataagttattaagt

SEQ ID NO: 63744 - DNA, 40 bp, Homo sapiens
cttaataacttataattttaaaaagctaattacttggcta

SEQ ID NO: 63745 - DNA, 40 bp, Homo sapiens
tagccaagtaattagctttttaaaattataagttattaag

SEQ ID NO: 63746 - DNA, 40 bp, Homo sapiens
ttaataacttataattttaaaaagctaattacttggctag

SEQ ID NO: 63747 - DNA, 40 bp, Homo sapiens
ctagccaagtaattagctttttaaaattataagttattaa

SEQ ID NO: 63748 - DNA, 40 bp, Homo sapiens
taataacttataattttaaaaagctaattacttggctaga

SEQ ID NO: 63749 - DNA, 40 bp, Homo sapiens
tctagccaagtaattagctttttaaaattataagttatta

SEQ ID NO: 63750 - DNA, 40 bp, Homo sapiens
aataacttataattttaaaaagctaattacttggctagaa

SEQ ID NO: 63751 - DNA, 40 bp, Homo sapiens
ttctagccaagtaattagctttttaaaattataagttatt

SEQ ID NO: 63752 - DNA, 40 bp, Homo sapiens
ataacttataattttaaaaagctaattacttggctagaat

SEQ ID NO: 63753 - DNA, 40 bp, Homo sapiens
attctagccaagtaattagctttttaaaattataagttat

SEQ ID NO: 63754 - DNA, 40 bp, Homo sapiens
taacttataattttaaaaagctaattacttggctagaata

SEQ ID NO: 63755 - DNA, 40 bp, Homo sapiens
tattctagccaagtaattagctttttaaaattataagtta

SEQ ID NO: 63756 - DNA, 40 bp, Homo sapiens
aacttataattttaaaaagctaattacttggctagaatat

SEQ ID NO: 63757 - DNA, 40 bp, Homo sapiens
atattctagccaagtaattagctttttaaaattataagtt

SEQ ID NO: 63758 - DNA, 40 bp, Homo sapiens
acttataattttaaaaagctaattacttggctagaatata

SEQ ID NO: 63759 - DNA, 40 bp, Homo sapiens
tatattctagccaagtaattagctttttaaaattataagt

SEQ ID NO: 63760 - DNA, 40 bp, Homo sapiens
cttataattttaaaaagctaattacttggctagaatataa

SEQ ID NO: 63761 - DNA, 40 bp, Homo sapiens
ttatattctagccaagtaattagctttttaaaattataag

SEQ ID NO: 63762 - DNA, 40 bp, Homo sapiens
ttataattttaaaaagctaattacttggctagaatataat

SEQ ID NO: 63763 - DNA, 40 bp, Homo sapiens
attatattctagccaagtaattagctttttaaaattataa

SEQ ID NO: 63764 - DNA, 40 bp, Homo sapiens
tataattttaaaaagctaattacttggctagaatataatg

SEQ ID NO: 63765 - DNA, 40 bp, Homo sapiens
cattatattctagccaagtaattagctttttaaaattata

SEQ ID NO: 63766 - DNA, 40 bp, Homo sapiens
ataattttaaaaagctaattacttggctagaatataatgc

SEQ ID NO: 63767 - DNA, 40 bp, Homo sapiens
gcattatattctagccaagtaattagctttttaaaattat

SEQ ID NO: 63768 - DNA, 40 bp, Homo sapiens
taattttaaaaagctaattacttggctagaatataatgcg

SEQ ID NO: 63769 - DNA, 40 bp, Homo sapiens
cgcattatattctagccaagtaattagctttttaaaatta

SEQ ID NO: 63770 - DNA, 40 bp, Homo sapiens
aattttaaaaagctaattacttggctagaatataatgcgt

SEQ ID NO: 63771 - DNA, 40 bp, Homo sapiens
acgcattatattctagccaagtaattagctttttaaaatt

SEQ ID NO: 63772 - DNA, 40 bp, Homo sapiens
attttaaaaagctaattacttggctagaatataatgcgtt

SEQ ID NO: 63773 - DNA, 40 bp, Homo sapiens
aacgcattatattctagccaagtaattagctttttaaaat

SEQ ID NO: 63774 - DNA, 40 bp, Homo sapiens
ttttaaaaagctaattacttggctagaatataatgcgtta

SEQ ID NO: 63775 - DNA, 40 bp, Homo sapiens
taacgcattatattctagccaagtaattagctttttaaaa

SEQ ID NO: 63776 - DNA, 40 bp, Homo sapiens
tttaaaaagctaattacttggctagaatataatgcgttac

SEQ ID NO: 63777 - DNA, 40 bp, Homo sapiens
gtaacgcattatattctagccaagtaattagctttttaaa

SEQ ID NO: 63778 - DNA, 40 bp, Homo sapiens
ttaaaaagctaattacttggctagaatataatgcgttaca

SEQ ID NO: 63779 - DNA, 40 bp, Homo sapiens
tgtaacgcattatattctagccaagtaattagctttttaa

SEQ ID NO: 63780 - DNA, 40 bp, Homo sapiens
taaaaagctaattacttggctagaatataatgcgttacat

SEQ ID NO: 63781 - DNA, 40 bp, Homo sapiens
atgtaacgcattatattctagccaagtaattagcttttta

SEQ ID NO: 63782 - DNA, 40 bp, Homo sapiens
aaaaagctaattacttggctagaatataatgcgttacata

SEQ ID NO: 63783 - DNA, 40 bp, Homo sapiens
tatgtaacgcattatattctagccaagtaattagcttttt

SEQ ID NO: 63784 - DNA, 40 bp, Homo sapiens
aaaagctaattacttggctagaatataatgcgttacatat

SEQ ID NO: 63785 - DNA, 40 bp, Homo sapiens
atatgtaacgcattatattctagccaagtaattagctttt

SEQ ID NO: 63786 - DNA, 40 bp, Homo sapiens
aaagctaattacttggctagaatataatgcgttacatatt

SEQ ID NO: 63787 - DNA, 40 bp, Homo sapiens
aatatgtaacgcattatattctagccaagtaattagcttt

SEQ ID NO: 63788 - DNA, 40 bp, Homo sapiens
aagctaattacttggctagaatataatgcgttacatattc

SEQ ID NO: 63789 - DNA, 40 bp, Homo sapiens
gaatatgtaacgcattatattctagccaagtaattagctt

SEQ ID NO: 63790 - DNA, 40 bp, Homo sapiens
agctaattacttggctagaatataatgcgttacatattct

SEQ ID NO: 63791 - DNA, 40 bp, Homo sapiens
agaatatgtaacgcattatattctagccaagtaattagct

SEQ ID NO: 63792 - DNA, 40 bp, Homo sapiens
gctaattacttggctagaatataatgcgttacatattctt

SEQ ID NO: 63793 - DNA, 40 bp, Homo sapiens
aagaatatgtaacgcattatattctagccaagtaattagc

SEQ ID NO: 63794 - DNA, 40 bp, Homo sapiens
ctaattacttggctagaatataatgcgttacatattcttt

SEQ ID NO: 63795 - DNA, 40 bp, Homo sapiens
aaagaatatgtaacgcattatattctagccaagtaattag

SEQ ID NO: 63796 - DNA, 40 bp, Homo sapiens
taattacttggctagaatataatgcgttacatattcttta

SEQ ID NO: 63797 - DNA, 40 bp, Homo sapiens
taaagaatatgtaacgcattatattctagccaagtaatta

SEQ ID NO: 63798 - DNA, 40 bp, Homo sapiens
aattacttggctagaatataatgcgttacatattctttac

SEQ ID NO: 63799 - DNA, 40 bp, Homo sapiens
gtaaagaatatgtaacgcattatattctagccaagtaatt

SEQ ID NO: 63800 - DNA, 40 bp, Homo sapiens
attacttggctagaatataatgcgttacatattctttaca

SEQ ID NO: 63801 - DNA, 40 bp, Homo sapiens
tgtaaagaatatgtaacgcattatattctagccaagtaat

SEQ ID NO: 63802 - DNA, 40 bp, Homo sapiens
ttacttggctagaatataatgcgttacatattctttacac

SEQ ID NO: 63803 - DNA, 40 bp, Homo sapiens
gtgtaaagaatatgtaacgcattatattctagccaagtaa

SEQ ID NO: 63804 - DNA, 40 bp, Homo sapiens
tacttggctagaatataatgcgttacatattctttacact

SEQ ID NO: 63805 - DNA, 40 bp, Homo sapiens
agtgtaaagaatatgtaacgcattatattctagccaagta

SEQ ID NO: 63806 - DNA, 40 bp, Homo sapiens
acttggctagaatataatgcgttacatattctttacactc

SEQ ID NO: 63807 - DNA, 40 bp, Homo sapiens
gagtgtaaagaatatgtaacgcattatattctagccaagt

SEQ ID NO: 63808 - DNA, 40 bp, Homo sapiens
cttggctagaatataatgcgttacatattctttacactca

SEQ ID NO: 63809 - DNA, 40 bp, Homo sapiens
tgagtgtaaagaatatgtaacgcattatattctagccaag

SEQ ID NO: 63810 - DNA, 40 bp, Homo sapiens
ttggctagaatataatgcgttacatattctttacactcag

SEQ ID NO: 63811 - DNA, 40 bp, Homo sapiens
ctgagtgtaaagaatatgtaacgcattatattctagccaa

SEQ ID NO: 63812 - DNA, 40 bp, Homo sapiens
tggctagaatataatgcgttacatattctttacactcagt

SEQ ID NO: 63813 - DNA, 40 bp, Homo sapiens
actgagtgtaaagaatatgtaacgcattatattctagcca

SEQ ID NO: 63814 - DNA, 40 bp, Homo sapiens
ggctagaatataatgcgttacatattctttacactcagtt

SEQ ID NO: 63815 - DNA, 40 bp, Homo sapiens
aactgagtgtaaagaatatgtaacgcattatattctagcc

SEQ ID NO: 63816 - DNA, 40 bp, Homo sapiens
gctagaatataatgcgttacatattctttacactcagttc

SEQ ID NO: 63817 - DNA, 40 bp, Homo sapiens
gaactgagtgtaaagaatatgtaacgcattatattctagc

SEQ ID NO: 63818 - DNA, 40 bp, Homo sapiens
ctagaatataatgcgttacatattctttacactcagttca

SEQ ID NO: 63819 - DNA, 40 bp, Homo sapiens
tgaactgagtgtaaagaatatgtaacgcattatattctag

SEQ ID NO: 63820 - DNA, 40 bp, Homo sapiens
tagaatataatgcgttacatattctttacactcagttcag

SEQ ID NO: 63821 - DNA, 40 bp, Homo sapiens
ctgaactgagtgtaaagaatatgtaacgcattatattcta

SEQ ID NO: 63822 - DNA, 40 bp, Homo sapiens
agaatataatgcgttacatattctttacactcagttcagt

SEQ ID NO: 63823 - DNA, 40 bp, Homo sapiens
actgaactgagtgtaaagaatatgtaacgcattatattct

SEQ ID NO: 63824 - DNA, 40 bp, Homo sapiens
gaatataatgcgttacatattctttacactcagttcagtc

SEQ ID NO: 63825 - DNA, 40 bp, Homo sapiens
gactgaactgagtgtaaagaatatgtaacgcattatattc

SEQ ID NO: 63826 - DNA, 40 bp, Homo sapiens
aatataatgcgttacatattctttacactcagttcagtcc

SEQ ID NO: 63827 - DNA, 40 bp, Homo sapiens
ggactgaactgagtgtaaagaatatgtaacgcattatatt

SEQ ID NO: 63828 - DNA, 40 bp, Homo sapiens
atataatgcgttacatattctttacactcagttcagtcca

SEQ ID NO: 63829 - DNA, 40 bp, Homo sapiens
tggactgaactgagtgtaaagaatatgtaacgcattatat

SEQ ID NO: 63830 - DNA, 40 bp, Homo sapiens
tataatgcgttacatattctttacactcagttcagtccat

SEQ ID NO: 63831 - DNA, 40 bp, Homo sapiens
atggactgaactgagtgtaaagaatatgtaacgcattata

SEQ ID NO: 63832 - DNA, 40 bp, Homo sapiens
ataatgcgttacatattctttacactcagttcagtccata

SEQ ID NO: 63833 - DNA, 40 bp, Homo sapiens
tatggactgaactgagtgtaaagaatatgtaacgcattat

SEQ ID NO: 63834 - DNA, 40 bp, Homo sapiens
taatgcgttacatattctttacactcagttcagtccatat

SEQ ID NO: 63835 - DNA, 40 bp, Homo sapiens
atatggactgaactgagtgtaaagaatatgtaacgcatta

SEQ ID NO: 63836 - DNA, 40 bp, Homo sapiens
aatgcgttacatattctttacactcagttcagtccatatc

SEQ ID NO: 63837 - DNA, 40 bp, Homo sapiens
gatatggactgaactgagtgtaaagaatatgtaacgcatt

SEQ ID NO: 63838 - DNA, 40 bp, Homo sapiens
atgcgttacatattctttacactcagttcagtccatatct

SEQ ID NO: 63839 - DNA, 40 bp, Homo sapiens
agatatggactgaactgagtgtaaagaatatgtaacgcat

SEQ ID NO: 63840 - DNA, 40 bp, Homo sapiens
tgcgttacatattctttacactcagttcagtccatatctg

SEQ ID NO: 63841 - DNA, 40 bp, Homo sapiens
cagatatggactgaactgagtgtaaagaatatgtaacgca

SEQ ID NO: 63842 - DNA, 40 bp, Homo sapiens
gcgttacatattctttacactcagttcagtccatatctga

SEQ ID NO: 63843 - DNA, 40 bp, Homo sapiens
tcagatatggactgaactgagtgtaaagaatatgtaacgc

SEQ ID NO: 63844 - DNA, 40 bp, Homo sapiens
cgttacatattctttacactcagttcagtccatatctgaa

SEQ ID NO: 63845 - DNA, 40 bp, Homo sapiens
ttcagatatggactgaactgagtgtaaagaatatgtaacg

SEQ ID NO: 63846 - DNA, 40 bp, Homo sapiens
gttacatattctttacactcagttcagtccatatctgaaa

SEQ ID NO: 63847 - DNA, 40 bp, Homo sapiens
tttcagatatggactgaactgagtgtaaagaatatgtaac

SEQ ID NO: 63848 - DNA, 40 bp, Homo sapiens
ttacatattctttacactcagttcagtccatatctgaaag

SEQ ID NO: 63849 - DNA, 40 bp, Homo sapiens
ctttcagatatggactgaactgagtgtaaagaatatgtaa

SEQ ID NO: 63850 - DNA, 40 bp, Homo sapiens
tacatattctttacactcagttcagtccatatctgaaagg

SEQ ID NO: 63851 - DNA, 40 bp, Homo sapiens
cctttcagatatggactgaactgagtgtaaagaatatgta

SEQ ID NO: 63852 - DNA, 40 bp, Homo sapiens
acatattctttacactcagttcagtccatatctgaaaggc

SEQ ID NO: 63853 - DNA, 40 bp, Homo sapiens
gcctttcagatatggactgaactgagtgtaaagaatatgt

SEQ ID NO: 63854 - DNA, 40 bp, Homo sapiens
catattctttacactcagttcagtccatatctgaaaggca

SEQ ID NO: 63855 - DNA, 40 bp, Homo sapiens
tgcctttcagatatggactgaactgagtgtaaagaatatg

SEQ ID NO: 63856 - DNA, 40 bp, Homo sapiens
atattctttacactcagttcagtccatatctgaaaggcaa

SEQ ID NO: 63857 - DNA, 40 bp, Homo sapiens
ttgcctttcagatatggactgaactgagtgtaaagaatat

SEQ ID NO: 63858 - DNA, 40 bp, Homo sapiens
tattctttacactcagttcagtccatatctgaaaggcaaa

SEQ ID NO: 63859 - DNA, 40 bp, Homo sapiens
tttgcctttcagatatggactgaactgagtgtaaagaata

SEQ ID NO: 63860 - DNA, 40 bp, Homo sapiens
attctttacactcagttcagtccatatctgaaaggcaaat

SEQ ID NO: 63861 - DNA, 40 bp, Homo sapiens
atttgcctttcagatatggactgaactgagtgtaaagaat

SEQ ID NO: 63862 - DNA, 40 bp, Homo sapiens
ttctttacactcagttcagtccatatctgaaaggcaaata

SEQ ID NO: 63863 - DNA, 40 bp, Homo sapiens
tatttgcctttcagatatggactgaactgagtgtaaagaa

SEQ ID NO: 63864 - DNA, 40 bp, Homo sapiens
tctttacactcagttcagtccatatctgaaaggcaaatag

SEQ ID NO: 63865 - DNA, 40 bp, Homo sapiens
ctatttgcctttcagatatggactgaactgagtgtaaaga

SEQ ID NO: 63866 - DNA, 40 bp, Homo sapiens
ctttacactcagttcagtccatatctgaaaggcaaataga

SEQ ID NO: 63867 - DNA, 40 bp, Homo sapiens
tctatttgcctttcagatatggactgaactgagtgtaaag

SEQ ID NO: 63868 - DNA, 40 bp, Homo sapiens
tttacactcagttcagtccatatctgaaaggcaaatagaa

SEQ ID NO: 63869 - DNA, 40 bp, Homo sapiens
ttctatttgcctttcagatatggactgaactgagtgtaaa

SEQ ID NO: 63870 - DNA, 40 bp, Homo sapiens
ttacactcagttcagtccatatctgaaaggcaaatagaat

SEQ ID NO: 63871 - DNA, 40 bp, Homo sapiens
attctatttgcctttcagatatggactgaactgagtgtaa

SEQ ID NO: 63872 - DNA, 40 bp, Homo sapiens
tacactcagttcagtccatatctgaaaggcaaatagaatt

SEQ ID NO: 63873 - DNA, 40 bp, Homo sapiens
aattctatttgcctttcagatatggactgaactgagtgta

SEQ ID NO: 63874 - DNA, 40 bp, Homo sapiens
acactcagttcagtccatatctgaaaggcaaatagaatta

SEQ ID NO: 63875 - DNA, 40 bp, Homo sapiens
taattctatttgcctttcagatatggactgaactgagtgt

SEQ ID NO: 63876 - DNA, 40 bp, Homo sapiens
cactcagttcagtccatatctgaaaggcaaatagaattat

SEQ ID NO: 63877 - DNA, 40 bp, Homo sapiens
ataattctatttgcctttcagatatggactgaactgagtg

SEQ ID NO: 63878 - DNA, 40 bp, Homo sapiens
actcagttcagtccatatctgaaaggcaaatagaattatt

SEQ ID NO: 63879 - DNA, 40 bp, Homo sapiens
aataattctatttgcctttcagatatggactgaactgagt

SEQ ID NO: 63880 - DNA, 40 bp, Homo sapiens
ctcagttcagtccatatctgaaaggcaaatagaattattt

SEQ ID NO: 63881 - DNA, 40 bp, Homo sapiens
aaataattctatttgcctttcagatatggactgaactgag

SEQ ID NO: 63882 - DNA, 40 bp, Homo sapiens
tcagttcagtccatatctgaaaggcaaatagaattatttt

SEQ ID NO: 63883 - DNA, 40 bp, Homo sapiens
aaaataattctatttgcctttcagatatggactgaactga

SEQ ID NO: 63884 - DNA, 40 bp, Homo sapiens
cagttcagtccatatctgaaaggcaaatagaattattttc

SEQ ID NO: 63885 - DNA, 40 bp, Homo sapiens
gaaaataattctatttgcctttcagatatggactgaactg

SEQ ID NO: 63886 - DNA, 40 bp, Homo sapiens
agttcagtccatatctgaaaggcaaatagaattattttct

SEQ ID NO: 63887 - DNA, 40 bp, Homo sapiens
agaaaataattctatttgcctttcagatatggactgaact

SEQ ID NO: 63888 - DNA, 40 bp, Homo sapiens
gttcagtccatatctgaaaggcaaatagaattattttctg

SEQ ID NO: 63889 - DNA, 40 bp, Homo sapiens
cagaaaataattctatttgcctttcagatatggactgaac

SEQ ID NO: 63890 - DNA, 40 bp, Homo sapiens
ttcagtccatatctgaaaggcaaatagaattattttctgc

SEQ ID NO: 63891 - DNA, 40 bp, Homo sapiens
gcagaaaataattctatttgcctttcagatatggactgaa

SEQ ID NO: 63892 - DNA, 40 bp, Homo sapiens
tcagtccatatctgaaaggcaaatagaattattttctgct

SEQ ID NO: 63893 - DNA, 40 bp, Homo sapiens
agcagaaaataattctatttgcctttcagatatggactga

SEQ ID NO: 63894 - DNA, 40 bp, Homo sapiens
cagtccatatctgaaaggcaaatagaattattttctgcta

SEQ ID NO: 63895 - DNA, 40 bp, Homo sapiens
tagcagaaaataattctatttgcctttcagatatggactg

SEQ ID NO: 63896 - DNA, 40 bp, Homo sapiens
agtccatatctgaaaggcaaatagaattattttctgctag

SEQ ID NO: 63897 - DNA, 40 bp, Homo sapiens
ctagcagaaaataattctatttgcctttcagatatggact

SEQ ID NO: 63898 - DNA, 40 bp, Homo sapiens
gtccatatctgaaaggcaaatagaattattttctgctagt

SEQ ID NO: 63899 - DNA, 40 bp, Homo sapiens
actagcagaaaataattctatttgcctttcagatatggac

SEQ ID NO: 63900 - DNA, 40 bp, Homo sapiens
tccatatctgaaaggcaaatagaattattttctgctagta

SEQ ID NO: 63901 - DNA, 40 bp, Homo sapiens
tactagcagaaaataattctatttgcctttcagatatgga

SEQ ID NO: 63902 - DNA, 40 bp, Homo sapiens
ccatatctgaaaggcaaatagaattattttctgctagtac

SEQ ID NO: 63903 - DNA, 40 bp, Homo sapiens
gtactagcagaaaataattctatttgcctttcagatatgg

SEQ ID NO: 63904 - DNA, 40 bp, Homo sapiens
catatctgaaaggcaaatagaattattttctgctagtaca

SEQ ID NO: 63905 - DNA, 40 bp, Homo sapiens
tgtactagcagaaaataattctatttgcctttcagatatg

SEQ ID NO: 63906 - DNA, 40 bp, Homo sapiens
atatctgaaaggcaaatagaattattttctgctagtacat

SEQ ID NO: 63907 - DNA, 40 bp, Homo sapiens
atgtactagcagaaaataattctatttgcctttcagatat

SEQ ID NO: 63908 - DNA, 40 bp, Homo sapiens
tatctgaaaggcaaatagaattattttctgctagtacatt

SEQ ID NO: 63909 - DNA, 40 bp, Homo sapiens
aatgtactagcagaaaataattctatttgcctttcagata

SEQ ID NO: 63910 - DNA, 40 bp, Homo sapiens
atctgaaaggcaaatagaattattttctgctagtacattg

SEQ ID NO: 63911 - DNA, 40 bp, Homo sapiens
caatgtactagcagaaaataattctatttgcctttcagat

SEQ ID NO: 63912 - DNA, 40 bp, Homo sapiens
tctgaaaggcaaatagaattattttctgctagtacattgt

SEQ ID NO: 63913 - DNA, 40 bp, Homo sapiens
acaatgtactagcagaaaataattctatttgcctttcaga

SEQ ID NO: 63914 - DNA, 40 bp, Homo sapiens
ctgaaaggcaaatagaattattttctgctagtacattgtg

SEQ ID NO: 63915 - DNA, 40 bp, Homo sapiens
cacaatgtactagcagaaaataattctatttgcctttcag

SEQ ID NO: 63916 - DNA, 40 bp, Homo sapiens
tgaaaggcaaatagaattattttctgctagtacattgtgt

SEQ ID NO: 63917 - DNA, 40 bp, Homo sapiens
acacaatgtactagcagaaaataattctatttgcctttca

SEQ ID NO: 63918 - DNA, 40 bp, Homo sapiens
gaaaggcaaatagaattattttctgctagtacattgtgta

SEQ ID NO: 63919 - DNA, 40 bp, Homo sapiens
tacacaatgtactagcagaaaataattctatttgcctttc

SEQ ID NO: 63920 - DNA, 40 bp, Homo sapiens
aaaggcaaatagaattattttctgctagtacattgtgtag

SEQ ID NO: 63921 - DNA, 40 bp, Homo sapiens
ctacacaatgtactagcagaaaataattctatttgccttt

SEQ ID NO: 63922 - DNA, 40 bp, Homo sapiens
aaggcaaatagaattattttctgctagtacattgtgtagt

SEQ ID NO: 63923 - DNA, 40 bp, Homo sapiens
actacacaatgtactagcagaaaataattctatttgcctt

SEQ ID NO: 63924 - DNA, 40 bp, Homo sapiens
aggcaaatagaattattttctgctagtacattgtgtagtc

SEQ ID NO: 63925 - DNA, 40 bp, Homo sapiens
gactacacaatgtactagcagaaaataattctatttgcct

SEQ ID NO: 63926 - DNA, 40 bp, Homo sapiens
ggcaaatagaattattttctgctagtacattgtgtagtcc

SEQ ID NO: 63927 - DNA, 40 bp, Homo sapiens
ggactacacaatgtactagcagaaaataattctatttgcc

SEQ ID NO: 63928 - DNA, 40 bp, Homo sapiens
gcaaatagaattattttctgctagtacattgtgtagtccc

SEQ ID NO: 63929 - DNA, 40 bp, Homo sapiens
gggactacacaatgtactagcagaaaataattctatttgc

SEQ ID NO: 63930 - DNA, 40 bp, Homo sapiens
caaatagaattattttctgctagtacattgtgtagtccct

SEQ ID NO: 63931 - DNA, 40 bp, Homo sapiens
agggactacacaatgtactagcagaaaataattctatttg

SEQ ID NO: 63932 - DNA, 40 bp, Homo sapiens
aaatagaattattttctgctagtacattgtgtagtcccta

SEQ ID NO: 63933 - DNA, 40 bp, Homo sapiens
tagggactacacaatgtactagcagaaaataattctattt

SEQ ID NO: 63934 - DNA, 40 bp, Homo sapiens
aatagaattattttctgctagtacattgtgtagtccctat

SEQ ID NO: 63935 - DNA, 40 bp, Homo sapiens
atagggactacacaatgtactagcagaaaataattctatt

SEQ ID NO: 63936 - DNA, 40 bp, Homo sapiens
atagaattattttctgctagtacattgtgtagtccctatg

SEQ ID NO: 63937 - DNA, 40 bp, Homo sapiens
catagggactacacaatgtactagcagaaaataattctat

SEQ ID NO: 63938 - DNA, 40 bp, Homo sapiens
tagaattattttctgctagtacattgtgtagtccctatgt

SEQ ID NO: 63939 - DNA, 40 bp, Homo sapiens
acatagggactacacaatgtactagcagaaaataattcta

SEQ ID NO: 63940 - DNA, 40 bp, Homo sapiens
agaattattttctgctagtacattgtgtagtccctatgtt

SEQ ID NO: 63941 - DNA, 40 bp, Homo sapiens
aacatagggactacacaatgtactagcagaaaataattct

SEQ ID NO: 63942 - DNA, 40 bp, Homo sapiens
gaattattttctgctagtacattgtgtagtccctatgttc

SEQ ID NO: 63943 - DNA, 40 bp, Homo sapiens
gaacatagggactacacaatgtactagcagaaaataattc

SEQ ID NO: 63944 - DNA, 40 bp, Homo sapiens
aattattttctgctagtacattgtgtagtccctatgttcc

SEQ ID NO: 63945 - DNA, 40 bp, Homo sapiens
ggaacatagggactacacaatgtactagcagaaaataatt

SEQ ID NO: 63946 - DNA, 40 bp, Homo sapiens
attattttctgctagtacattgtgtagtccctatgttcct

SEQ ID NO: 63947 - DNA, 40 bp, Homo sapiens
aggaacatagggactacacaatgtactagcagaaaataat

SEQ ID NO: 63948 - DNA, 40 bp, Homo sapiens
ttattttctgctagtacattgtgtagtccctatgttccta

SEQ ID NO: 63949 - DNA, 40 bp, Homo sapiens
taggaacatagggactacacaatgtactagcagaaaataa

SEQ ID NO: 63950 - DNA, 40 bp, Homo sapiens
tattttctgctagtacattgtgtagtccctatgttcctag

SEQ ID NO: 63951 - DNA, 40 bp, Homo sapiens
ctaggaacatagggactacacaatgtactagcagaaaata

SEQ ID NO: 63952 - DNA, 40 bp, Homo sapiens
attttctgctagtacattgtgtagtccctatgttcctagt

SEQ ID NO: 63953 - DNA, 40 bp, Homo sapiens
actaggaacatagggactacacaatgtactagcagaaaat

SEQ ID NO: 63954 - DNA, 40 bp, Homo sapiens
ttttctgctagtacattgtgtagtccctatgttcctagtg

SEQ ID NO: 63955 - DNA, 40 bp, Homo sapiens
cactaggaacatagggactacacaatgtactagcagaaaa

SEQ ID NO: 63956 - DNA, 40 bp, Homo sapiens
tttctgctagtacattgtgtagtccctatgttcctagtgt

SEQ ID NO: 63957 - DNA, 40 bp, Homo sapiens
acactaggaacatagggactacacaatgtactagcagaaa

SEQ ID NO: 63958 - DNA, 40 bp, Homo sapiens
ttctgctagtacattgtgtagtccctatgttcctagtgta

SEQ ID NO: 63959 - DNA, 40 bp, Homo sapiens
tacactaggaacatagggactacacaatgtactagcagaa

SEQ ID NO: 63960 - DNA, 40 bp, Homo sapiens
tctgctagtacattgtgtagtccctatgttcctagtgtat

SEQ ID NO: 63961 - DNA, 40 bp, Homo sapiens
atacactaggaacatagggactacacaatgtactagcaga

SEQ ID NO: 63962 - DNA, 40 bp, Homo sapiens
ctgctagtacattgtgtagtccctatgttcctagtgtata

SEQ ID NO: 63963 - DNA, 40 bp, Homo sapiens
tatacactaggaacatagggactacacaatgtactagcag

SEQ ID NO: 63964 - DNA, 40 bp, Homo sapiens
tgctagtacattgtgtagtccctatgttcctagtgtataa

SEQ ID NO: 63965 - DNA, 40 bp, Homo sapiens
ttatacactaggaacatagggactacacaatgtactagca

SEQ ID NO: 63966 - DNA, 40 bp, Homo sapiens
gctagtacattgtgtagtccctatgttcctagtgtataag

SEQ ID NO: 63967 - DNA, 40 bp, Homo sapiens
cttatacactaggaacatagggactacacaatgtactagc

SEQ ID NO: 63968 - DNA, 40 bp, Homo sapiens
ctagtacattgtgtagtccctatgttcctagtgtataagg

SEQ ID NO: 63969 - DNA, 40 bp, Homo sapiens
ccttatacactaggaacatagggactacacaatgtactag

SEQ ID NO: 63970 - DNA, 40 bp, Homo sapiens
tagtacattgtgtagtccctatgttcctagtgtataagga

SEQ ID NO: 63971 - DNA, 40 bp, Homo sapiens
tccttatacactaggaacatagggactacacaatgtacta

SEQ ID NO: 63972 - DNA, 40 bp, Homo sapiens
agtacattgtgtagtccctatgttcctagtgtataaggac

SEQ ID NO: 63973 - DNA, 40 bp, Homo sapiens
gtccttatacactaggaacatagggactacacaatgtact

SEQ ID NO: 63974 - DNA, 40 bp, Homo sapiens
gtacattgtgtagtccctatgttcctagtgtataaggact

SEQ ID NO: 63975 - DNA, 40 bp, Homo sapiens
agtccttatacactaggaacatagggactacacaatgtac

SEQ ID NO: 63976 - DNA, 40 bp, Homo sapiens
tacattgtgtagtccctatgttcctagtgtataaggactg

SEQ ID NO: 63977 - DNA, 40 bp, Homo sapiens
cagtccttatacactaggaacatagggactacacaatgta

SEQ ID NO: 63978 - DNA, 40 bp, Homo sapiens
acattgtgtagtccctatgttcctagtgtataaggactgt

SEQ ID NO: 63979 - DNA, 40 bp, Homo sapiens
acagtccttatacactaggaacatagggactacacaatgt

SEQ ID NO: 63980 - DNA, 40 bp, Homo sapiens
cattgtgtagtccctatgttcctagtgtataaggactgtt

SEQ ID NO: 63981 - DNA, 40 bp, Homo sapiens
aacagtccttatacactaggaacatagggactacacaatg

SEQ ID NO: 63982 - DNA, 40 bp, Homo sapiens
attgtgtagtccctatgttcctagtgtataaggactgtta

SEQ ID NO: 63983 - DNA, 40 bp, Homo sapiens
taacagtccttatacactaggaacatagggactacacaat

SEQ ID NO: 63984 - DNA, 40 bp, Homo sapiens
ttgtgtagtccctatgttcctagtgtataaggactgttac

SEQ ID NO: 63985 - DNA, 40 bp, Homo sapiens
gtaacagtccttatacactaggaacatagggactacacaa

SEQ ID NO: 63986 - DNA, 40 bp, Homo sapiens
tgtgtagtccctatgttcctagtgtataaggactgttacc

SEQ ID NO: 63987 - DNA, 40 bp, Homo sapiens
ggtaacagtccttatacactaggaacatagggactacaca

SEQ ID NO: 63988 - DNA, 40 bp, Homo sapiens
gtgtagtccctatgttcctagtgtataaggactgttacct

SEQ ID NO: 63989 - DNA, 40 bp, Homo sapiens
aggtaacagtccttatacactaggaacatagggactacac

SEQ ID NO: 63990 - DNA, 40 bp, Homo sapiens
tgtagtccctatgttcctagtgtataaggactgttaccta

SEQ ID NO: 63991 - DNA, 40 bp, Homo sapiens
taggtaacagtccttatacactaggaacatagggactaca

SEQ ID NO: 63992 - DNA, 40 bp, Homo sapiens
gtagtccctatgttcctagtgtataaggactgttacctag

SEQ ID NO: 63993 - DNA, 40 bp, Homo sapiens
ctaggtaacagtccttatacactaggaacatagggactac

SEQ ID NO: 63994 - DNA, 40 bp, Homo sapiens
tagtccctatgttcctagtgtataaggactgttacctagt

SEQ ID NO: 63995 - DNA, 40 bp, Homo sapiens
actaggtaacagtccttatacactaggaacatagggacta

SEQ ID NO: 63996 - DNA, 40 bp, Homo sapiens
agtccctatgttcctagtgtataaggactgttacctagtt

SEQ ID NO: 63997 - DNA, 40 bp, Homo sapiens
aactaggtaacagtccttatacactaggaacatagggact

SEQ ID NO: 63998 - DNA, 40 bp, Homo sapiens
gtccctatgttcctagtgtataaggactgttacctagttc

SEQ ID NO: 63999 - DNA, 40 bp, Homo sapiens
gaactaggtaacagtccttatacactaggaacatagggac

SEQ ID NO: 64000 - DNA, 40 bp, Homo sapiens
tccctatgttcctagtgtataaggactgttacctagttca

SEQ ID NO: 64001 - DNA, 40 bp, Homo sapiens
tgaactaggtaacagtccttatacactaggaacataggga

SEQ ID NO: 64002 - DNA, 40 bp, Homo sapiens
ccctatgttcctagtgtataaggactgttacctagttcac

SEQ ID NO: 64003 - DNA, 40 bp, Homo sapiens
gtgaactaggtaacagtccttatacactaggaacataggg

SEQ ID NO: 64004 - DNA, 40 bp, Homo sapiens
cctatgttcctagtgtataaggactgttacctagttcaca

SEQ ID NO: 64005 - DNA, 40 bp, Homo sapiens
tgtgaactaggtaacagtccttatacactaggaacatagg

SEQ ID NO: 64006 - DNA, 40 bp, Homo sapiens
ctatgttcctagtgtataaggactgttacctagttcacat

SEQ ID NO: 64007 - DNA, 40 bp, Homo sapiens
atgtgaactaggtaacagtccttatacactaggaacatag

SEQ ID NO: 64008 - DNA, 40 bp, Homo sapiens
tatgttcctagtgtataaggactgttacctagttcacatt

SEQ ID NO: 64009 - DNA, 40 bp, Homo sapiens
aatgtgaactaggtaacagtccttatacactaggaacata

SEQ ID NO: 64010 - DNA, 40 bp, Homo sapiens
atgttcctagtgtataaggactgttacctagttcacattt

SEQ ID NO: 64011 - DNA, 40 bp, Homo sapiens
aaatgtgaactaggtaacagtccttatacactaggaacat

SEQ ID NO: 64012 - DNA, 40 bp, Homo sapiens
tgttcctagtgtataaggactgttacctagttcacattta

SEQ ID NO: 64013 - DNA, 40 bp, Homo sapiens
taaatgtgaactaggtaacagtccttatacactaggaaca

SEQ ID NO: 64014 - DNA, 40 bp, Homo sapiens
gttcctagtgtataaggactgttacctagttcacatttat

SEQ ID NO: 64015 - DNA, 40 bp, Homo sapiens
ataaatgtgaactaggtaacagtccttatacactaggaac

SEQ ID NO: 64016 - DNA, 40 bp, Homo sapiens
ttcctagtgtataaggactgttacctagttcacatttatc

SEQ ID NO: 64017 - DNA, 40 bp, Homo sapiens
gataaatgtgaactaggtaacagtccttatacactaggaa

SEQ ID NO: 64018 - DNA, 40 bp, Homo sapiens
tcctagtgtataaggactgttacctagttcacatttatct

SEQ ID NO: 64019 - DNA, 40 bp, Homo sapiens
agataaatgtgaactaggtaacagtccttatacactagga

SEQ ID NO: 64020 - DNA, 40 bp, Homo sapiens
cctagtgtataaggactgttacctagttcacatttatctg

SEQ ID NO: 64021 - DNA, 40 bp, Homo sapiens
cagataaatgtgaactaggtaacagtccttatacactagg

SEQ ID NO: 64022 - DNA, 40 bp, Homo sapiens
ctagtgtataaggactgttacctagttcacatttatctgg

SEQ ID NO: 64023 - DNA, 40 bp, Homo sapiens
ccagataaatgtgaactaggtaacagtccttatacactag

SEQ ID NO: 64024 - DNA, 40 bp, Homo sapiens
tagtgtataaggactgttacctagttcacatttatctggg

SEQ ID NO: 64025 - DNA, 40 bp, Homo sapiens
cccagataaatgtgaactaggtaacagtccttatacacta

SEQ ID NO: 64026 - DNA, 40 bp, Homo sapiens
agtgtataaggactgttacctagttcacatttatctgggt

SEQ ID NO: 64027 - DNA, 40 bp, Homo sapiens
acccagataaatgtgaactaggtaacagtccttatacact

SEQ ID NO: 64028 - DNA, 40 bp, Homo sapiens
gtgtataaggactgttacctagttcacatttatctgggtt

SEQ ID NO: 64029 - DNA, 40 bp, Homo sapiens
aacccagataaatgtgaactaggtaacagtccttatacac

SEQ ID NO: 64030 - DNA, 40 bp, Homo sapiens
tgtataaggactgttacctagttcacatttatctgggttg

SEQ ID NO: 64031 - DNA, 40 bp, Homo sapiens
caacccagataaatgtgaactaggtaacagtccttataca

SEQ ID NO: 64032 - DNA, 40 bp, Homo sapiens
gtataaggactgttacctagttcacatttatctgggttgt

SEQ ID NO: 64033 - DNA, 40 bp, Homo sapiens
acaacccagataaatgtgaactaggtaacagtccttatac

SEQ ID NO: 64034 - DNA, 40 bp, Homo sapiens
tataaggactgttacctagttcacatttatctgggttgtt

SEQ ID NO: 64035 - DNA, 40 bp, Homo sapiens
aacaacccagataaatgtgaactaggtaacagtccttata

SEQ ID NO: 64036 - DNA, 40 bp, Homo sapiens
ataaggactgttacctagttcacatttatctgggttgttg

SEQ ID NO: 64037 - DNA, 40 bp, Homo sapiens
caacaacccagataaatgtgaactaggtaacagtccttat

SEQ ID NO: 64038 - DNA, 40 bp, Homo sapiens
taaggactgttacctagttcacatttatctgggttgttga

SEQ ID NO: 64039 - DNA, 40 bp, Homo sapiens
tcaacaacccagataaatgtgaactaggtaacagtcctta

SEQ ID NO: 64040 - DNA, 40 bp, Homo sapiens
aaggactgttacctagttcacatttatctgggttgttgac

SEQ ID NO: 64041 - DNA, 40 bp, Homo sapiens
gtcaacaacccagataaatgtgaactaggtaacagtcctt

SEQ ID NO: 64042 - DNA, 40 bp, Homo sapiens
aggactgttacctagttcacatttatctgggttgttgaca

SEQ ID NO: 64043 - DNA, 40 bp, Homo sapiens
tgtcaacaacccagataaatgtgaactaggtaacagtcct

SEQ ID NO: 64044 - DNA, 40 bp, Homo sapiens
ggactgttacctagttcacatttatctgggttgttgacag

SEQ ID NO: 64045 - DNA, 40 bp, Homo sapiens
ctgtcaacaacccagataaatgtgaactaggtaacagtcc

SEQ ID NO: 64046 - DNA, 40 bp, Homo sapiens
gactgttacctagttcacatttatctgggttgttgacaga

SEQ ID NO: 64047 - DNA, 40 bp, Homo sapiens
tctgtcaacaacccagataaatgtgaactaggtaacagtc

SEQ ID NO: 64048 - DNA, 40 bp, Homo sapiens
actgttacctagttcacatttatctgggttgttgacagat

SEQ ID NO: 64049 - DNA, 40 bp, Homo sapiens
atctgtcaacaacccagataaatgtgaactaggtaacagt

SEQ ID NO: 64050 - DNA, 40 bp, Homo sapiens
ctgttacctagttcacatttatctgggttgttgacagatt

SEQ ID NO: 64051 - DNA, 40 bp, Homo sapiens
aatctgtcaacaacccagataaatgtgaactaggtaacag

SEQ ID NO: 64052 - DNA, 40 bp, Homo sapiens
tgttacctagttcacatttatctgggttgttgacagattt

SEQ ID NO: 64053 - DNA, 40 bp, Homo sapiens
aaatctgtcaacaacccagataaatgtgaactaggtaaca

SEQ ID NO: 64054 - DNA, 40 bp, Homo sapiens
gttacctagttcacatttatctgggttgttgacagatttt

SEQ ID NO: 64055 - DNA, 40 bp, Homo sapiens
aaaatctgtcaacaacccagataaatgtgaactaggtaac

SEQ ID NO: 64056 - DNA, 40 bp, Homo sapiens
ttacctagttcacatttatctgggttgttgacagattttc

SEQ ID NO: 64057 - DNA, 40 bp, Homo sapiens
gaaaatctgtcaacaacccagataaatgtgaactaggtaa

SEQ ID NO: 64058 - DNA, 40 bp, Homo sapiens
tacctagttcacatttatctgggttgttgacagattttcc

SEQ ID NO: 64059 - DNA, 40 bp, Homo sapiens
ggaaaatctgtcaacaacccagataaatgtgaactaggta

SEQ ID NO: 64060 - DNA, 40 bp, Homo sapiens
acctagttcacatttatctgggttgttgacagattttcct

SEQ ID NO: 64061 - DNA, 40 bp, Homo sapiens
aggaaaatctgtcaacaacccagataaatgtgaactaggt

SEQ ID NO: 64062 - DNA, 40 bp, Homo sapiens
cctagttcacatttatctgggttgttgacagattttcctg

SEQ ID NO: 64063 - DNA, 40 bp, Homo sapiens
caggaaaatctgtcaacaacccagataaatgtgaactagg

SEQ ID NO: 64064 - DNA, 40 bp, Homo sapiens
ctagttcacatttatctgggttgttgacagattttcctgg

SEQ ID NO: 64065 - DNA, 40 bp, Homo sapiens
ccaggaaaatctgtcaacaacccagataaatgtgaactag

SEQ ID NO: 64066 - DNA, 40 bp, Homo sapiens
tagttcacatttatctgggttgttgacagattttcctggt

SEQ ID NO: 64067 - DNA, 40 bp, Homo sapiens
accaggaaaatctgtcaacaacccagataaatgtgaacta

SEQ ID NO: 64068 - DNA, 40 bp, Homo sapiens
agttcacatttatctgggttgttgacagattttcctggtc

SEQ ID NO: 64069 - DNA, 40 bp, Homo sapiens
gaccaggaaaatctgtcaacaacccagataaatgtgaact

SEQ ID NO: 64070 - DNA, 40 bp, Homo sapiens
gttcacatttatctgggttgttgacagattttcctggtcc

SEQ ID NO: 64071 - DNA, 40 bp, Homo sapiens
ggaccaggaaaatctgtcaacaacccagataaatgtgaac

SEQ ID NO: 64072 - DNA, 40 bp, Homo sapiens
ttcacatttatctgggttgttgacagattttcctggtccc

SEQ ID NO: 64073 - DNA, 40 bp, Homo sapiens
gggaccaggaaaatctgtcaacaacccagataaatgtgaa

SEQ ID NO: 64074 - DNA, 40 bp, Homo sapiens
tcacatttatctgggttgttgacagattttcctggtccct

SEQ ID NO: 64075 - DNA, 40 bp, Homo sapiens
agggaccaggaaaatctgtcaacaacccagataaatgtga

SEQ ID NO: 64076 - DNA, 40 bp, Homo sapiens
cacatttatctgggttgttgacagattttcctggtccctt

SEQ ID NO: 64077 - DNA, 40 bp, Homo sapiens
aagggaccaggaaaatctgtcaacaacccagataaatgtg

SEQ ID NO: 64078 - DNA, 40 bp, Homo sapiens
acatttatctgggttgttgacagattttcctggtcccttt

SEQ ID NO: 64079 - DNA, 40 bp, Homo sapiens
aaagggaccaggaaaatctgtcaacaacccagataaatgt

SEQ ID NO: 64080 - DNA, 40 bp, Homo sapiens
catttatctgggttgttgacagattttcctggtccctttg

SEQ ID NO: 64081 - DNA, 40 bp, Homo sapiens
caaagggaccaggaaaatctgtcaacaacccagataaatg

SEQ ID NO: 64082 - DNA, 40 bp, Homo sapiens
atttatctgggttgttgacagattttcctggtccctttgg

SEQ ID NO: 64083 - DNA, 40 bp, Homo sapiens
ccaaagggaccaggaaaatctgtcaacaacccagataaat

SEQ ID NO: 64084 - DNA, 40 bp, Homo sapiens
tttatctgggttgttgacagattttcctggtccctttgga

SEQ ID NO: 64085 - DNA, 40 bp, Homo sapiens
tccaaagggaccaggaaaatctgtcaacaacccagataaa

SEQ ID NO: 64086 - DNA, 40 bp, Homo sapiens
ttatctgggttgttgacagattttcctggtccctttggac

SEQ ID NO: 64087 - DNA, 40 bp, Homo sapiens
gtccaaagggaccaggaaaatctgtcaacaacccagataa

SEQ ID NO: 64088 - DNA, 40 bp, Homo sapiens
tatctgggttgttgacagattttcctggtccctttggaca

SEQ ID NO: 64089 - DNA, 40 bp, Homo sapiens
tgtccaaagggaccaggaaaatctgtcaacaacccagata

SEQ ID NO: 64090 - DNA, 40 bp, Homo sapiens
atctgggttgttgacagattttcctggtccctttggacag

SEQ ID NO: 64091 - DNA, 40 bp, Homo sapiens
ctgtccaaagggaccaggaaaatctgtcaacaacccagat

SEQ ID NO: 64092 - DNA, 40 bp, Homo sapiens
tctgggttgttgacagattttcctggtccctttggacagt

SEQ ID NO: 64093 - DNA, 40 bp, Homo sapiens
actgtccaaagggaccaggaaaatctgtcaacaacccaga

SEQ ID NO: 64094 - DNA, 40 bp, Homo sapiens
ctgggttgttgacagattttcctggtccctttggacagtg

SEQ ID NO: 64095 - DNA, 40 bp, Homo sapiens
cactgtccaaagggaccaggaaaatctgtcaacaacccag

SEQ ID NO: 64096 - DNA, 40 bp, Homo sapiens
tgggttgttgacagattttcctggtccctttggacagtgc

SEQ ID NO: 64097 - DNA, 40 bp, Homo sapiens
gcactgtccaaagggaccaggaaaatctgtcaacaaccca

SEQ ID NO: 64098 - DNA, 40 bp, Homo sapiens
gggttgttgacagattttcctggtccctttggacagtgca

SEQ ID NO: 64099 - DNA, 40 bp, Homo sapiens
tgcactgtccaaagggaccaggaaaatctgtcaacaaccc

SEQ ID NO: 64100 - DNA, 40 bp, Homo sapiens
ggttgttgacagattttcctggtccctttggacagtgcat

SEQ ID NO: 64101 - DNA, 40 bp, Homo sapiens
atgcactgtccaaagggaccaggaaaatctgtcaacaacc

SEQ ID NO: 64102 - DNA, 40 bp, Homo sapiens
gttgttgacagattttcctggtccctttggacagtgcatg

SEQ ID NO: 64103 - DNA, 40 bp, Homo sapiens
catgcactgtccaaagggaccaggaaaatctgtcaacaac

SEQ ID NO: 64104 - DNA, 40 bp, Homo sapiens
ttgttgacagattttcctggtccctttggacagtgcatgg

SEQ ID NO: 64105 - DNA, 40 bp, Homo sapiens
ccatgcactgtccaaagggaccaggaaaatctgtcaacaa

SEQ ID NO: 64106 - DNA, 40 bp, Homo sapiens
tgttgacagattttcctggtccctttggacagtgcatggc

SEQ ID NO: 64107 - DNA, 40 bp, Homo sapiens
gccatgcactgtccaaagggaccaggaaaatctgtcaaca

SEQ ID NO: 64108 - DNA, 40 bp, Homo sapiens
gttgacagattttcctggtccctttggacagtgcatggcc

SEQ ID NO: 64109 - DNA, 40 bp, Homo sapiens
ggccatgcactgtccaaagggaccaggaaaatctgtcaac

SEQ ID NO: 64110 - DNA, 40 bp, Homo sapiens
ttgacagattttcctggtccctttggacagtgcatggcca

SEQ ID NO: 64111 - DNA, 40 bp, Homo sapiens
tggccatgcactgtccaaagggaccaggaaaatctgtcaa

SEQ ID NO: 64112 - DNA, 40 bp, Homo sapiens
tgacagattttcctggtccctttggacagtgcatggccat

SEQ ID NO: 64113 - DNA, 40 bp, Homo sapiens
atggccatgcactgtccaaagggaccaggaaaatctgtca

SEQ ID NO: 64114 - DNA, 40 bp, Homo sapiens
gacagattttcctggtccctttggacagtgcatggccatg

SEQ ID NO: 64115 - DNA, 40 bp, Homo sapiens
catggccatgcactgtccaaagggaccaggaaaatctgtc

SEQ ID NO: 64116 - DNA, 40 bp, Homo sapiens
acagattttcctggtccctttggacagtgcatggccatgt

SEQ ID NO: 64117 - DNA, 40 bp, Homo sapiens
acatggccatgcactgtccaaagggaccaggaaaatctgt

SEQ ID NO: 64118 - DNA, 40 bp, Homo sapiens
cagattttcctggtccctttggacagtgcatggccatgtt

SEQ ID NO: 64119 - DNA, 40 bp, Homo sapiens
aacatggccatgcactgtccaaagggaccaggaaaatctg

SEQ ID NO: 64120 - DNA, 40 bp, Homo sapiens
agattttcctggtccctttggacagtgcatggccatgttg

SEQ ID NO: 64121 - DNA, 40 bp, Homo sapiens
caacatggccatgcactgtccaaagggaccaggaaaatct

SEQ ID NO: 64122 - DNA, 40 bp, Homo sapiens
gattttcctggtccctttggacagtgcatggccatgttgg

SEQ ID NO: 64123 - DNA, 40 bp, Homo sapiens
ccaacatggccatgcactgtccaaagggaccaggaaaatc

SEQ ID NO: 64124 - DNA, 40 bp, Homo sapiens
attttcctggtccctttggacagtgcatggccatgttggc

SEQ ID NO: 64125 - DNA, 40 bp, Homo sapiens
gccaacatggccatgcactgtccaaagggaccaggaaaat

SEQ ID NO: 64126 - DNA, 40 bp, Homo sapiens
ttttcctggtccctttggacagtgcatggccatgttggca

SEQ ID NO: 64127 - DNA, 40 bp, Homo sapiens
tgccaacatggccatgcactgtccaaagggaccaggaaaa

SEQ ID NO: 64128 - DNA, 40 bp, Homo sapiens
tttcctggtccctttggacagtgcatggccatgttggcaa

SEQ ID NO: 64129 - DNA, 40 bp, Homo sapiens
ttgccaacatggccatgcactgtccaaagggaccaggaaa

SEQ ID NO: 64130 - DNA, 40 bp, Homo sapiens
ttcctggtccctttggacagtgcatggccatgttggcaaa

SEQ ID NO: 64131 - DNA, 40 bp, Homo sapiens
tttgccaacatggccatgcactgtccaaagggaccaggaa

SEQ ID NO: 64132 - DNA, 40 bp, Homo sapiens
tcctggtccctttggacagtgcatggccatgttggcaaaa

SEQ ID NO: 64133 - DNA, 40 bp, Homo sapiens
ttttgccaacatggccatgcactgtccaaagggaccagga

SEQ ID NO: 64134 - DNA, 40 bp, Homo sapiens
cctggtccctttggacagtgcatggccatgttggcaaaag

SEQ ID NO: 64135 - DNA, 40 bp, Homo sapiens
cttttgccaacatggccatgcactgtccaaagggaccagg

SEQ ID NO: 64136 - DNA, 40 bp, Homo sapiens
ctggtccctttggacagtgcatggccatgttggcaaaagc

SEQ ID NO: 64137 - DNA, 40 bp, Homo sapiens
gcttttgccaacatggccatgcactgtccaaagggaccag

SEQ ID NO: 64138 - DNA, 40 bp, Homo sapiens
tggtccctttggacagtgcatggccatgttggcaaaagct

SEQ ID NO: 64139 - DNA, 40 bp, Homo sapiens
agcttttgccaacatggccatgcactgtccaaagggacca

SEQ ID NO: 64140 - DNA, 40 bp, Homo sapiens
ggtccctttggacagtgcatggccatgttggcaaaagctg

SEQ ID NO: 64141 - DNA, 40 bp, Homo sapiens
cagcttttgccaacatggccatgcactgtccaaagggacc

SEQ ID NO: 64142 - DNA, 40 bp, Homo sapiens
gtccctttggacagtgcatggccatgttggcaaaagctgt

SEQ ID NO: 64143 - DNA, 40 bp, Homo sapiens
acagcttttgccaacatggccatgcactgtccaaagggac

SEQ ID NO: 64144 - DNA, 40 bp, Homo sapiens
tccctttggacagtgcatggccatgttggcaaaagctgtc

SEQ ID NO: 64145 - DNA, 40 bp, Homo sapiens
gacagcttttgccaacatggccatgcactgtccaaaggga

SEQ ID NO: 64146 - DNA, 40 bp, Homo sapiens
ccctttggacagtgcatggccatgttggcaaaagctgtca

SEQ ID NO: 64147 - DNA, 40 bp, Homo sapiens
tgacagcttttgccaacatggccatgcactgtccaaaggg

SEQ ID NO: 64148 - DNA, 40 bp, Homo sapiens
cctttggacagtgcatggccatgttggcaaaagctgtcaa

SEQ ID NO: 64149 - DNA, 40 bp, Homo sapiens
ttgacagcttttgccaacatggccatgcactgtccaaagg

SEQ ID NO: 64150 - DNA, 40 bp, Homo sapiens
ctttggacagtgcatggccatgttggcaaaagctgtcaaa

SEQ ID NO: 64151 - DNA, 40 bp, Homo sapiens
tttgacagcttttgccaacatggccatgcactgtccaaag

SEQ ID NO: 64152 - DNA, 40 bp, Homo sapiens
tttggacagtgcatggccatgttggcaaaagctgtcaaaa

SEQ ID NO: 64153 - DNA, 40 bp, Homo sapiens
ttttgacagcttttgccaacatggccatgcactgtccaaa

SEQ ID NO: 64154 - DNA, 40 bp, Homo sapiens
ttggacagtgcatggccatgttggcaaaagctgtcaaaat

SEQ ID NO: 64155 - DNA, 40 bp, Homo sapiens
attttgacagcttttgccaacatggccatgcactgtccaa

SEQ ID NO: 64156 - DNA, 40 bp, Homo sapiens
tggacagtgcatggccatgttggcaaaagctgtcaaaatt

SEQ ID NO: 64157 - DNA, 40 bp, Homo sapiens
aattttgacagcttttgccaacatggccatgcactgtcca

SEQ ID NO: 64158 - DNA, 40 bp, Homo sapiens
ggacagtgcatggccatgttggcaaaagctgtcaaaattg

SEQ ID NO: 64159 - DNA, 40 bp, Homo sapiens
caattttgacagcttttgccaacatggccatgcactgtcc

SEQ ID NO: 64160 - DNA, 40 bp, Homo sapiens
gacagtgcatggccatgttggcaaaagctgtcaaaattga

SEQ ID NO: 64161 - DNA, 40 bp, Homo sapiens
tcaattttgacagcttttgccaacatggccatgcactgtc

SEQ ID NO: 64162 - DNA, 40 bp, Homo sapiens
acagtgcatggccatgttggcaaaagctgtcaaaattgaa

SEQ ID NO: 64163 - DNA, 40 bp, Homo sapiens
ttcaattttgacagcttttgccaacatggccatgcactgt

SEQ ID NO: 64164 - DNA, 40 bp, Homo sapiens
cagtgcatggccatgttggcaaaagctgtcaaaattgaaa

SEQ ID NO: 64165 - DNA, 40 bp, Homo sapiens
tttcaattttgacagcttttgccaacatggccatgcactg

SEQ ID NO: 64166 - DNA, 40 bp, Homo sapiens
agtgcatggccatgttggcaaaagctgtcaaaattgaaac

SEQ ID NO: 64167 - DNA, 40 bp, Homo sapiens
gtttcaattttgacagcttttgccaacatggccatgcact

SEQ ID NO: 64168 - DNA, 40 bp, Homo sapiens
gtgcatggccatgttggcaaaagctgtcaaaattgaaaca

SEQ ID NO: 64169 - DNA, 40 bp, Homo sapiens
tgtttcaattttgacagcttttgccaacatggccatgcac

SEQ ID NO: 64170 - DNA, 40 bp, Homo sapiens
tgcatggccatgttggcaaaagctgtcaaaattgaaacat

SEQ ID NO: 64171 - DNA, 40 bp, Homo sapiens
atgtttcaattttgacagcttttgccaacatggccatgca

SEQ ID NO: 64172 - DNA, 40 bp, Homo sapiens
gcatggccatgttggcaaaagctgtcaaaattgaaacatt

SEQ ID NO: 64173 - DNA, 40 bp, Homo sapiens
aatgtttcaattttgacagcttttgccaacatggccatgc

SEQ ID NO: 64174 - DNA, 40 bp, Homo sapiens
catggccatgttggcaaaagctgtcaaaattgaaacattg

SEQ ID NO: 64175 - DNA, 40 bp, Homo sapiens
caatgtttcaattttgacagcttttgccaacatggccatg

SEQ ID NO: 64176 - DNA, 40 bp, Homo sapiens
atggccatgttggcaaaagctgtcaaaattgaaacattga

SEQ ID NO: 64177 - DNA, 40 bp, Homo sapiens
tcaatgtttcaattttgacagcttttgccaacatggccat

SEQ ID NO: 64178 - DNA, 40 bp, Homo sapiens
tggccatgttggcaaaagctgtcaaaattgaaacattgac

SEQ ID NO: 64179 - DNA, 40 bp, Homo sapiens
gtcaatgtttcaattttgacagcttttgccaacatggcca

SEQ ID NO: 64180 - DNA, 40 bp, Homo sapiens
ggccatgttggcaaaagctgtcaaaattgaaacattgaca

SEQ ID NO: 64181 - DNA, 40 bp, Homo sapiens
tgtcaatgtttcaattttgacagcttttgccaacatggcc

SEQ ID NO: 64182 - DNA, 40 bp, Homo sapiens
gccatgttggcaaaagctgtcaaaattgaaacattgacac

SEQ ID NO: 64183 - DNA, 40 bp, Homo sapiens
gtgtcaatgtttcaattttgacagcttttgccaacatggc

SEQ ID NO: 64184 - DNA, 40 bp, Homo sapiens
ccatgttggcaaaagctgtcaaaattgaaacattgacacc

SEQ ID NO: 64185 - DNA, 40 bp, Homo sapiens
ggtgtcaatgtttcaattttgacagcttttgccaacatgg

SEQ ID NO: 64186 - DNA, 40 bp, Homo sapiens
catgttggcaaaagctgtcaaaattgaaacattgacacca

SEQ ID NO: 64187 - DNA, 40 bp, Homo sapiens
tggtgtcaatgtttcaattttgacagcttttgccaacatg

SEQ ID NO: 64188 - DNA, 40 bp, Homo sapiens
atgttggcaaaagctgtcaaaattgaaacattgacaccat

SEQ ID NO: 64189 - DNA, 40 bp, Homo sapiens
atggtgtcaatgtttcaattttgacagcttttgccaacat

SEQ ID NO: 64190 - DNA, 40 bp, Homo sapiens
tgttggcaaaagctgtcaaaattgaaacattgacaccatg

SEQ ID NO: 64191 - DNA, 40 bp, Homo sapiens
catggtgtcaatgtttcaattttgacagcttttgccaaca

SEQ ID NO: 64192 - DNA, 40 bp, Homo sapiens
gttggcaaaagctgtcaaaattgaaacattgacaccatga

SEQ ID NO: 64193 - DNA, 40 bp, Homo sapiens
tcatggtgtcaatgtttcaattttgacagcttttgccaac

SEQ ID NO: 64194 - DNA, 40 bp, Homo sapiens
ttggcaaaagctgtcaaaattgaaacattgacaccatgag

SEQ ID NO: 64195 - DNA, 40 bp, Homo sapiens
ctcatggtgtcaatgtttcaattttgacagcttttgccaa

SEQ ID NO: 64196 - DNA, 40 bp, Homo sapiens
tggcaaaagctgtcaaaattgaaacattgacaccatgaga

SEQ ID NO: 64197 - DNA, 40 bp, Homo sapiens
tctcatggtgtcaatgtttcaattttgacagcttttgcca

SEQ ID NO: 64198 - DNA, 40 bp, Homo sapiens
ggcaaaagctgtcaaaattgaaacattgacaccatgagaa

SEQ ID NO: 64199 - DNA, 40 bp, Homo sapiens
ttctcatggtgtcaatgtttcaattttgacagcttttgcc

SEQ ID NO: 64200 - DNA, 40 bp, Homo sapiens
gcaaaagctgtcaaaattgaaacattgacaccatgagaat

SEQ ID NO: 64201 - DNA, 40 bp, Homo sapiens
attctcatggtgtcaatgtttcaattttgacagcttttgc

SEQ ID NO: 64202 - DNA, 40 bp, Homo sapiens
caaaagctgtcaaaattgaaacattgacaccatgagaatt

SEQ ID NO: 64203 - DNA, 40 bp, Homo sapiens
aattctcatggtgtcaatgtttcaattttgacagcttttg

SEQ ID NO: 64204 - DNA, 40 bp, Homo sapiens
aaaagctgtcaaaattgaaacattgacaccatgagaattg

SEQ ID NO: 64205 - DNA, 40 bp, Homo sapiens
caattctcatggtgtcaatgtttcaattttgacagctttt

SEQ ID NO: 64206 - DNA, 40 bp, Homo sapiens
aaagctgtcaaaattgaaacattgacaccatgagaattgt

SEQ ID NO: 64207 - DNA, 40 bp, Homo sapiens
acaattctcatggtgtcaatgtttcaattttgacagcttt

SEQ ID NO: 64208 - DNA, 40 bp, Homo sapiens
aagctgtcaaaattgaaacattgacaccatgagaattgtg

SEQ ID NO: 64209 - DNA, 40 bp, Homo sapiens
cacaattctcatggtgtcaatgtttcaattttgacagctt

SEQ ID NO: 64210 - DNA, 40 bp, Homo sapiens
agctgtcaaaattgaaacattgacaccatgagaattgtgt

SEQ ID NO: 64211 - DNA, 40 bp, Homo sapiens
acacaattctcatggtgtcaatgtttcaattttgacagct

SEQ ID NO: 64212 - DNA, 40 bp, Homo sapiens
gctgtcaaaattgaaacattgacaccatgagaattgtgtg

SEQ ID NO: 64213 - DNA, 40 bp, Homo sapiens
cacacaattctcatggtgtcaatgtttcaattttgacagc

SEQ ID NO: 64214 - DNA, 40 bp, Homo sapiens
ctgtcaaaattgaaacattgacaccatgagaattgtgtgt

SEQ ID NO: 64215 - DNA, 40 bp, Homo sapiens
acacacaattctcatggtgtcaatgtttcaattttgacag

SEQ ID NO: 64216 - DNA, 40 bp, Homo sapiens
tgtcaaaattgaaacattgacaccatgagaattgtgtgtt

SEQ ID NO: 64217 - DNA, 40 bp, Homo sapiens
aacacacaattctcatggtgtcaatgtttcaattttgaca

SEQ ID NO: 64218 - DNA, 40 bp, Homo sapiens
gtcaaaattgaaacattgacaccatgagaattgtgtgttt

SEQ ID NO: 64219 - DNA, 40 bp, Homo sapiens
aaacacacaattctcatggtgtcaatgtttcaattttgac

SEQ ID NO: 64220 - DNA, 40 bp, Homo sapiens
tcaaaattgaaacattgacaccatgagaattgtgtgtttt

SEQ ID NO: 64221 - DNA, 40 bp, Homo sapiens
aaaacacacaattctcatggtgtcaatgtttcaattttga

SEQ ID NO: 64222 - DNA, 40 bp, Homo sapiens
caaaattgaaacattgacaccatgagaattgtgtgttttc

SEQ ID NO: 64223 - DNA, 40 bp, Homo sapiens
gaaaacacacaattctcatggtgtcaatgtttcaattttg

SEQ ID NO: 64224 - DNA, 40 bp, Homo sapiens
aaaattgaaacattgacaccatgagaattgtgtgttttcc

SEQ ID NO: 64225 - DNA, 40 bp, Homo sapiens
ggaaaacacacaattctcatggtgtcaatgtttcaatttt

SEQ ID NO: 64226 - DNA, 40 bp, Homo sapiens
aaattgaaacattgacaccatgagaattgtgtgttttcca

SEQ ID NO: 64227 - DNA, 40 bp, Homo sapiens
tggaaaacacacaattctcatggtgtcaatgtttcaattt

SEQ ID NO: 64228 - DNA, 40 bp, Homo sapiens
aattgaaacattgacaccatgagaattgtgtgttttccag

SEQ ID NO: 64229 - DNA, 40 bp, Homo sapiens
ctggaaaacacacaattctcatggtgtcaatgtttcaatt

SEQ ID NO: 64230 - DNA, 40 bp, Homo sapiens
attgaaacattgacaccatgagaattgtgtgttttccagt

SEQ ID NO: 64231 - DNA, 40 bp, Homo sapiens
actggaaaacacacaattctcatggtgtcaatgtttcaat

SEQ ID NO: 64232 - DNA, 40 bp, Homo sapiens
ttgaaacattgacaccatgagaattgtgtgttttccagtc

SEQ ID NO: 64233 - DNA, 40 bp, Homo sapiens
gactggaaaacacacaattctcatggtgtcaatgtttcaa

SEQ ID NO: 64234 - DNA, 40 bp, Homo sapiens
tgaaacattgacaccatgagaattgtgtgttttccagtct

SEQ ID NO: 64235 - DNA, 40 bp, Homo sapiens
agactggaaaacacacaattctcatggtgtcaatgtttca

SEQ ID NO: 64236 - DNA, 40 bp, Homo sapiens
gaaacattgacaccatgagaattgtgtgttttccagtctg

SEQ ID NO: 64237 - DNA, 40 bp, Homo sapiens
cagactggaaaacacacaattctcatggtgtcaatgtttc

SEQ ID NO: 64238 - DNA, 40 bp, Homo sapiens
aaacattgacaccatgagaattgtgtgttttccagtctgc

SEQ ID NO: 64239 - DNA, 40 bp, Homo sapiens
gcagactggaaaacacacaattctcatggtgtcaatgttt

SEQ ID NO: 64240 - DNA, 40 bp, Homo sapiens
aacattgacaccatgagaattgtgtgttttccagtctgct

SEQ ID NO: 64241 - DNA, 40 bp, Homo sapiens
agcagactggaaaacacacaattctcatggtgtcaatgtt

SEQ ID NO: 64242 - DNA, 40 bp, Homo sapiens
acattgacaccatgagaattgtgtgttttccagtctgcta

SEQ ID NO: 64243 - DNA, 40 bp, Homo sapiens
tagcagactggaaaacacacaattctcatggtgtcaatgt

SEQ ID NO: 64244 - DNA, 40 bp, Homo sapiens
cattgacaccatgagaattgtgtgttttccagtctgctaa

SEQ ID NO: 64245 - DNA, 40 bp, Homo sapiens
ttagcagactggaaaacacacaattctcatggtgtcaatg

SEQ ID NO: 64246 - DNA, 40 bp, Homo sapiens
attgacaccatgagaattgtgtgttttccagtctgctaaa

SEQ ID NO: 64247 - DNA, 40 bp, Homo sapiens
tttagcagactggaaaacacacaattctcatggtgtcaat

SEQ ID NO: 64248 - DNA, 40 bp, Homo sapiens
ttgacaccatgagaattgtgtgttttccagtctgctaaaa

SEQ ID NO: 64249 - DNA, 40 bp, Homo sapiens
ttttagcagactggaaaacacacaattctcatggtgtcaa

SEQ ID NO: 64250 - DNA, 40 bp, Homo sapiens
tgacaccatgagaattgtgtgttttccagtctgctaaaat

SEQ ID NO: 64251 - DNA, 40 bp, Homo sapiens
attttagcagactggaaaacacacaattctcatggtgtca

SEQ ID NO: 64252 - DNA, 40 bp, Homo sapiens
gacaccatgagaattgtgtgttttccagtctgctaaaatc

SEQ ID NO: 64253 - DNA, 40 bp, Homo sapiens
gattttagcagactggaaaacacacaattctcatggtgtc

SEQ ID NO: 64254 - DNA, 40 bp, Homo sapiens
acaccatgagaattgtgtgttttccagtctgctaaaatca

SEQ ID NO: 64255 - DNA, 40 bp, Homo sapiens
tgattttagcagactggaaaacacacaattctcatggtgt

SEQ ID NO: 64256 - DNA, 40 bp, Homo sapiens
caccatgagaattgtgtgttttccagtctgctaaaatcaa

SEQ ID NO: 64257 - DNA, 40 bp, Homo sapiens
ttgattttagcagactggaaaacacacaattctcatggtg

SEQ ID NO: 64258 - DNA, 40 bp, Homo sapiens
accatgagaattgtgtgttttccagtctgctaaaatcaaa

SEQ ID NO: 64259 - DNA, 40 bp, Homo sapiens
tttgattttagcagactggaaaacacacaattctcatggt

SEQ ID NO: 64260 - DNA, 40 bp, Homo sapiens
ccatgagaattgtgtgttttccagtctgctaaaatcaaaa

SEQ ID NO: 64261 - DNA, 40 bp, Homo sapiens
ttttgattttagcagactggaaaacacacaattctcatgg

SEQ ID NO: 64262 - DNA, 40 bp, Homo sapiens
catgagaattgtgtgttttccagtctgctaaaatcaaaag

SEQ ID NO: 64263 - DNA, 40 bp, Homo sapiens
cttttgattttagcagactggaaaacacacaattctcatg

SEQ ID NO: 64264 - DNA, 40 bp, Homo sapiens
atgagaattgtgtgttttccagtctgctaaaatcaaaagt

SEQ ID NO: 64265 - DNA, 40 bp, Homo sapiens
acttttgattttagcagactggaaaacacacaattctcat

SEQ ID NO: 64266 - DNA, 40 bp, Homo sapiens
tgagaattgtgtgttttccagtctgctaaaatcaaaagtg

SEQ ID NO: 64267 - DNA, 40 bp, Homo sapiens
cacttttgattttagcagactggaaaacacacaattctca

SEQ ID NO: 64268 - DNA, 40 bp, Homo sapiens
gagaattgtgtgttttccagtctgctaaaatcaaaagtgg

SEQ ID NO: 64269 - DNA, 40 bp, Homo sapiens
ccacttttgattttagcagactggaaaacacacaattctc

SEQ ID NO: 64270 - DNA, 40 bp, Homo sapiens
agaattgtgtgttttccagtctgctaaaatcaaaagtggg

SEQ ID NO: 64271 - DNA, 40 bp, Homo sapiens
cccacttttgattttagcagactggaaaacacacaattct

SEQ ID NO: 64272 - DNA, 40 bp, Homo sapiens
gaattgtgtgttttccagtctgctaaaatcaaaagtggga

SEQ ID NO: 64273 - DNA, 40 bp, Homo sapiens
tcccacttttgattttagcagactggaaaacacacaattc

SEQ ID NO: 64274 - DNA, 40 bp, Homo sapiens
aattgtgtgttttccagtctgctaaaatcaaaagtgggag

SEQ ID NO: 64275 - DNA, 40 bp, Homo sapiens
ctcccacttttgattttagcagactggaaaacacacaatt

SEQ ID NO: 64276 - DNA, 40 bp, Homo sapiens
attgtgtgttttccagtctgctaaaatcaaaagtgggagg

SEQ ID NO: 64277 - DNA, 40 bp, Homo sapiens
cctcccacttttgattttagcagactggaaaacacacaat

SEQ ID NO: 64278 - DNA, 40 bp, Homo sapiens
ttgtgtgttttccagtctgctaaaatcaaaagtgggaggg

SEQ ID NO: 64279 - DNA, 40 bp, Homo sapiens
ccctcccacttttgattttagcagactggaaaacacacaa

SEQ ID NO: 64280 - DNA, 40 bp, Homo sapiens
tgtgtgttttccagtctgctaaaatcaaaagtgggagggt

SEQ ID NO: 64281 - DNA, 40 bp, Homo sapiens
accctcccacttttgattttagcagactggaaaacacaca

SEQ ID NO: 64282 - DNA, 40 bp, Homo sapiens
gtgtgttttccagtctgctaaaatcaaaagtgggagggtt

SEQ ID NO: 64283 - DNA, 40 bp, Homo sapiens
aaccctcccacttttgattttagcagactggaaaacacac

SEQ ID NO: 64284 - DNA, 40 bp, Homo sapiens
tgtgttttccagtctgctaaaatcaaaagtgggagggttc

SEQ ID NO: 64285 - DNA, 40 bp, Homo sapiens
gaaccctcccacttttgattttagcagactggaaaacaca

SEQ ID NO: 64286 - DNA, 40 bp, Homo sapiens
gtgttttccagtctgctaaaatcaaaagtgggagggttca

SEQ ID NO: 64287 - DNA, 40 bp, Homo sapiens
tgaaccctcccacttttgattttagcagactggaaaacac

SEQ ID NO: 64288 - DNA, 40 bp, Homo sapiens
tgttttccagtctgctaaaatcaaaagtgggagggttcag

SEQ ID NO: 64289 - DNA, 40 bp, Homo sapiens
ctgaaccctcccacttttgattttagcagactggaaaaca

SEQ ID NO: 64290 - DNA, 40 bp, Homo sapiens
gttttccagtctgctaaaatcaaaagtgggagggttcagt

SEQ ID NO: 64291 - DNA, 40 bp, Homo sapiens
actgaaccctcccacttttgattttagcagactggaaaac

SEQ ID NO: 64292 - DNA, 40 bp, Homo sapiens
ttttccagtctgctaaaatcaaaagtgggagggttcagta

SEQ ID NO: 64293 - DNA, 40 bp, Homo sapiens
tactgaaccctcccacttttgattttagcagactggaaaa

SEQ ID NO: 64294 - DNA, 40 bp, Homo sapiens
tttccagtctgctaaaatcaaaagtgggagggttcagtaa

SEQ ID NO: 64295 - DNA, 40 bp, Homo sapiens
ttactgaaccctcccacttttgattttagcagactggaaa

SEQ ID NO: 64296 - DNA, 40 bp, Homo sapiens
ttccagtctgctaaaatcaaaagtgggagggttcagtaag

SEQ ID NO: 64297 - DNA, 40 bp, Homo sapiens
cttactgaaccctcccacttttgattttagcagactggaa

SEQ ID NO: 64298 - DNA, 40 bp, Homo sapiens
tccagtctgctaaaatcaaaagtgggagggttcagtaagg

SEQ ID NO: 64299 - DNA, 40 bp, Homo sapiens
ccttactgaaccctcccacttttgattttagcagactgga

SEQ ID NO: 64300 - DNA, 40 bp, Homo sapiens
ccagtctgctaaaatcaaaagtgggagggttcagtaaggt

SEQ ID NO: 64301 - DNA, 40 bp, Homo sapiens
accttactgaaccctcccacttttgattttagcagactgg

SEQ ID NO: 64302 - DNA, 40 bp, Homo sapiens
cagtctgctaaaatcaaaagtgggagggttcagtaaggtg

SEQ ID NO: 64303 - DNA, 40 bp, Homo sapiens
caccttactgaaccctcccacttttgattttagcagactg

SEQ ID NO: 64304 - DNA, 40 bp, Homo sapiens
agtctgctaaaatcaaaagtgggagggttcagtaaggtga

SEQ ID NO: 64305 - DNA, 40 bp, Homo sapiens
tcaccttactgaaccctcccacttttgattttagcagact

SEQ ID NO: 64306 - DNA, 40 bp, Homo sapiens
gtctgctaaaatcaaaagtgggagggttcagtaaggtgaa

SEQ ID NO: 64307 - DNA, 40 bp, Homo sapiens
ttcaccttactgaaccctcccacttttgattttagcagac

SEQ ID NO: 64308 - DNA, 40 bp, Homo sapiens
tctgctaaaatcaaaagtgggagggttcagtaaggtgaat

SEQ ID NO: 64309 - DNA, 40 bp, Homo sapiens
attcaccttactgaaccctcccacttttgattttagcaga

SEQ ID NO: 64310 - DNA, 40 bp, Homo sapiens
ctgctaaaatcaaaagtgggagggttcagtaaggtgaata

SEQ ID NO: 64311 - DNA, 40 bp, Homo sapiens
tattcaccttactgaaccctcccacttttgattttagcag

SEQ ID NO: 64312 - DNA, 40 bp, Homo sapiens
tgctaaaatcaaaagtgggagggttcagtaaggtgaataa

SEQ ID NO: 64313 - DNA, 40 bp, Homo sapiens
ttattcaccttactgaaccctcccacttttgattttagca

SEQ ID NO: 64314 - DNA, 40 bp, Homo sapiens
gctaaaatcaaaagtgggagggttcagtaaggtgaataac

SEQ ID NO: 64315 - DNA, 40 bp, Homo sapiens
gttattcaccttactgaaccctcccacttttgattttagc

SEQ ID NO: 64316 - DNA, 40 bp, Homo sapiens
ctaaaatcaaaagtgggagggttcagtaaggtgaataaca

SEQ ID NO: 64317 - DNA, 40 bp, Homo sapiens
tgttattcaccttactgaaccctcccacttttgattttag

SEQ ID NO: 64318 - DNA, 40 bp, Homo sapiens
taaaatcaaaagtgggagggttcagtaaggtgaataacag

SEQ ID NO: 64319 - DNA, 40 bp, Homo sapiens
ctgttattcaccttactgaaccctcccacttttgatttta

SEQ ID NO: 64320 - DNA, 40 bp, Homo sapiens
aaaatcaaaagtgggagggttcagtaaggtgaataacaga

SEQ ID NO: 64321 - DNA, 40 bp, Homo sapiens
tctgttattcaccttactgaaccctcccacttttgatttt

SEQ ID NO: 64322 - DNA, 40 bp, Homo sapiens
aaatcaaaagtgggagggttcagtaaggtgaataacagaa

SEQ ID NO: 64323 - DNA, 40 bp, Homo sapiens
ttctgttattcaccttactgaaccctcccacttttgattt

SEQ ID NO: 64324 - DNA, 40 bp, Homo sapiens
aatcaaaagtgggagggttcagtaaggtgaataacagaag

SEQ ID NO: 64325 - DNA, 40 bp, Homo sapiens
cttctgttattcaccttactgaaccctcccacttttgatt

SEQ ID NO: 64326 - DNA, 40 bp, Homo sapiens
atcaaaagtgggagggttcagtaaggtgaataacagaagc

SEQ ID NO: 64327 - DNA, 40 bp, Homo sapiens
gcttctgttattcaccttactgaaccctcccacttttgat

SEQ ID NO: 64328 - DNA, 40 bp, Homo sapiens
tcaaaagtgggagggttcagtaaggtgaataacagaagca

SEQ ID NO: 64329 - DNA, 40 bp, Homo sapiens
tgcttctgttattcaccttactgaaccctcccacttttga

SEQ ID NO: 64330 - DNA, 40 bp, Homo sapiens
caaaagtgggagggttcagtaaggtgaataacagaagcag

SEQ ID NO: 64331 - DNA, 40 bp, Homo sapiens
ctgcttctgttattcaccttactgaaccctcccacttttg

SEQ ID NO: 64332 - DNA, 40 bp, Homo sapiens
aaaagtgggagggttcagtaaggtgaataacagaagcaga

SEQ ID NO: 64333 - DNA, 40 bp, Homo sapiens
tctgcttctgttattcaccttactgaaccctcccactttt

SEQ ID NO: 64334 - DNA, 40 bp, Homo sapiens
aaagtgggagggttcagtaaggtgaataacagaagcagag

SEQ ID NO: 64335 - DNA, 40 bp, Homo sapiens
ctctgcttctgttattcaccttactgaaccctcccacttt

SEQ ID NO: 64336 - DNA, 40 bp, Homo sapiens
aagtgggagggttcagtaaggtgaataacagaagcagagt

SEQ ID NO: 64337 - DNA, 40 bp, Homo sapiens
actctgcttctgttattcaccttactgaaccctcccactt

SEQ ID NO: 64338 - DNA, 40 bp, Homo sapiens
agtgggagggttcagtaaggtgaataacagaagcagagtt

SEQ ID NO: 64339 - DNA, 40 bp, Homo sapiens
aactctgcttctgttattcaccttactgaaccctcccact

SEQ ID NO: 64340 - DNA, 40 bp, Homo sapiens
gtgggagggttcagtaaggtgaataacagaagcagagttt

SEQ ID NO: 64341 - DNA, 40 bp, Homo sapiens
aaactctgcttctgttattcaccttactgaaccctcccac

SEQ ID NO: 64342 - DNA, 40 bp, Homo sapiens
tgggagggttcagtaaggtgaataacagaagcagagtttt

SEQ ID NO: 64343 - DNA, 40 bp, Homo sapiens
aaaactctgcttctgttattcaccttactgaaccctccca

SEQ ID NO: 64344 - DNA, 40 bp, Homo sapiens
gggagggttcagtaaggtgaataacagaagcagagttttc

SEQ ID NO: 64345 - DNA, 40 bp, Homo sapiens
gaaaactctgcttctgttattcaccttactgaaccctccc

SEQ ID NO: 64346 - DNA, 40 bp, Homo sapiens
ggagggttcagtaaggtgaataacagaagcagagttttcg

SEQ ID NO: 64347 - DNA, 40 bp, Homo sapiens
cgaaaactctgcttctgttattcaccttactgaaccctcc

SEQ ID NO: 64348 - DNA, 40 bp, Homo sapiens
gagggttcagtaaggtgaataacagaagcagagttttcgg

SEQ ID NO: 64349 - DNA, 40 bp, Homo sapiens
ccgaaaactctgcttctgttattcaccttactgaaccctc

SEQ ID NO: 64350 - DNA, 40 bp, Homo sapiens
agggttcagtaaggtgaataacagaagcagagttttcggg

SEQ ID NO: 64351 - DNA, 40 bp, Homo sapiens
cccgaaaactctgcttctgttattcaccttactgaaccct

SEQ ID NO: 64352 - DNA, 40 bp, Homo sapiens
gggttcagtaaggtgaataacagaagcagagttttcgggg

SEQ ID NO: 64353 - DNA, 40 bp, Homo sapiens
ccccgaaaactctgcttctgttattcaccttactgaaccc

SEQ ID NO: 64354 - DNA, 40 bp, Homo sapiens
ggttcagtaaggtgaataacagaagcagagttttcggggt

SEQ ID NO: 64355 - DNA, 40 bp, Homo sapiens
accccgaaaactctgcttctgttattcaccttactgaacc

SEQ ID NO: 64356 - DNA, 40 bp, Homo sapiens
gttcagtaaggtgaataacagaagcagagttttcggggta

SEQ ID NO: 64357 - DNA, 40 bp, Homo sapiens
taccccgaaaactctgcttctgttattcaccttactgaac

SEQ ID NO: 64358 - DNA, 40 bp, Homo sapiens
ttcagtaaggtgaataacagaagcagagttttcggggtat

SEQ ID NO: 64359 - DNA, 40 bp, Homo sapiens
ataccccgaaaactctgcttctgttattcaccttactgaa

SEQ ID NO: 64360 - DNA, 40 bp, Homo sapiens
tcagtaaggtgaataacagaagcagagttttcggggtatc

SEQ ID NO: 64361 - DNA, 40 bp, Homo sapiens
gataccccgaaaactctgcttctgttattcaccttactga

SEQ ID NO: 64362 - DNA, 40 bp, Homo sapiens
cagtaaggtgaataacagaagcagagttttcggggtatct

SEQ ID NO: 64363 - DNA, 40 bp, Homo sapiens
agataccccgaaaactctgcttctgttattcaccttactg

SEQ ID NO: 64364 - DNA, 40 bp, Homo sapiens
agtaaggtgaataacagaagcagagttttcggggtatctg

SEQ ID NO: 64365 - DNA, 40 bp, Homo sapiens
cagataccccgaaaactctgcttctgttattcaccttact

SEQ ID NO: 64366 - DNA, 40 bp, Homo sapiens
gtaaggtgaataacagaagcagagttttcggggtatctgt

SEQ ID NO: 64367 - DNA, 40 bp, Homo sapiens
acagataccccgaaaactctgcttctgttattcaccttac

SEQ ID NO: 64368 - DNA, 40 bp, Homo sapiens
taaggtgaataacagaagcagagttttcggggtatctgtt

SEQ ID NO: 64369 - DNA, 40 bp, Homo sapiens
aacagataccccgaaaactctgcttctgttattcacctta

SEQ ID NO: 64370 - DNA, 40 bp, Homo sapiens
aaggtgaataacagaagcagagttttcggggtatctgtta

SEQ ID NO: 64371 - DNA, 40 bp, Homo sapiens
taacagataccccgaaaactctgcttctgttattcacctt

SEQ ID NO: 64372 - DNA, 40 bp, Homo sapiens
aggtgaataacagaagcagagttttcggggtatctgttac

SEQ ID NO: 64373 - DNA, 40 bp, Homo sapiens
gtaacagataccccgaaaactctgcttctgttattcacct

SEQ ID NO: 64374 - DNA, 40 bp, Homo sapiens
ggtgaataacagaagcagagttttcggggtatctgttact

SEQ ID NO: 64375 - DNA, 40 bp, Homo sapiens
agtaacagataccccgaaaactctgcttctgttattcacc

SEQ ID NO: 64376 - DNA, 40 bp, Homo sapiens
gtgaataacagaagcagagttttcggggtatctgttactc

SEQ ID NO: 64377 - DNA, 40 bp, Homo sapiens
gagtaacagataccccgaaaactctgcttctgttattcac

SEQ ID NO: 64378 - DNA, 40 bp, Homo sapiens
tgaataacagaagcagagttttcggggtatctgttactcc

SEQ ID NO: 64379 - DNA, 40 bp, Homo sapiens
ggagtaacagataccccgaaaactctgcttctgttattca

SEQ ID NO: 64380 - DNA, 40 bp, Homo sapiens
gaataacagaagcagagttttcggggtatctgttactcct

SEQ ID NO: 64381 - DNA, 40 bp, Homo sapiens
aggagtaacagataccccgaaaactctgcttctgttattc

SEQ ID NO: 64382 - DNA, 40 bp, Homo sapiens
aataacagaagcagagttttcggggtatctgttactcctc

SEQ ID NO: 64383 - DNA, 40 bp, Homo sapiens
gaggagtaacagataccccgaaaactctgcttctgttatt

SEQ ID NO: 64384 - DNA, 40 bp, Homo sapiens
ataacagaagcagagttttcggggtatctgttactcctca

SEQ ID NO: 64385 - DNA, 40 bp, Homo sapiens
tgaggagtaacagataccccgaaaactctgcttctgttat

SEQ ID NO: 64386 - DNA, 40 bp, Homo sapiens
taacagaagcagagttttcggggtatctgttactcctcat

SEQ ID NO: 64387 - DNA, 40 bp, Homo sapiens
atgaggagtaacagataccccgaaaactctgcttctgtta

SEQ ID NO: 64388 - DNA, 40 bp, Homo sapiens
aacagaagcagagttttcggggtatctgttactcctcatt

SEQ ID NO: 64389 - DNA, 40 bp, Homo sapiens
aatgaggagtaacagataccccgaaaactctgcttctgtt

SEQ ID NO: 64390 - DNA, 40 bp, Homo sapiens
acagaagcagagttttcggggtatctgttactcctcattc

SEQ ID NO: 64391 - DNA, 40 bp, Homo sapiens
gaatgaggagtaacagataccccgaaaactctgcttctgt

SEQ ID NO: 64392 - DNA, 40 bp, Homo sapiens
cagaagcagagttttcggggtatctgttactcctcattcg

SEQ ID NO: 64393 - DNA, 40 bp, Homo sapiens
cgaatgaggagtaacagataccccgaaaactctgcttctg

SEQ ID NO: 64394 - DNA, 40 bp, Homo sapiens
agaagcagagttttcggggtatctgttactcctcattcgg

SEQ ID NO: 64395 - DNA, 40 bp, Homo sapiens
ccgaatgaggagtaacagataccccgaaaactctgcttct

SEQ ID NO: 64396 - DNA, 40 bp, Homo sapiens
gaagcagagttttcggggtatctgttactcctcattcggc

SEQ ID NO: 64397 - DNA, 40 bp, Homo sapiens
gccgaatgaggagtaacagataccccgaaaactctgcttc

SEQ ID NO: 64398 - DNA, 40 bp, Homo sapiens
aagcagagttttcggggtatctgttactcctcattcggct

SEQ ID NO: 64399 - DNA, 40 bp, Homo sapiens
agccgaatgaggagtaacagataccccgaaaactctgctt

SEQ ID NO: 64400 - DNA, 40 bp, Homo sapiens
agcagagttttcggggtatctgttactcctcattcggctt

SEQ ID NO: 64401 - DNA, 40 bp, Homo sapiens
aagccgaatgaggagtaacagataccccgaaaactctgct

SEQ ID NO: 64402 - DNA, 40 bp, Homo sapiens
gcagagttttcggggtatctgttactcctcattcggcttt

SEQ ID NO: 64403 - DNA, 40 bp, Homo sapiens
aaagccgaatgaggagtaacagataccccgaaaactctgc

SEQ ID NO: 64404 - DNA, 40 bp, Homo sapiens
cagagttttcggggtatctgttactcctcattcggctttt

SEQ ID NO: 64405 - DNA, 40 bp, Homo sapiens
aaaagccgaatgaggagtaacagataccccgaaaactctg

SEQ ID NO: 64406 - DNA, 40 bp, Homo sapiens
agagttttcggggtatctgttactcctcattcggcttttc

SEQ ID NO: 64407 - DNA, 40 bp, Homo sapiens
gaaaagccgaatgaggagtaacagataccccgaaaactct

SEQ ID NO: 64408 - DNA, 40 bp, Homo sapiens
gagttttcggggtatctgttactcctcattcggcttttct

SEQ ID NO: 64409 - DNA, 40 bp, Homo sapiens
agaaaagccgaatgaggagtaacagataccccgaaaactc

SEQ ID NO: 64410 - DNA, 40 bp, Homo sapiens
agttttcggggtatctgttactcctcattcggcttttctg

SEQ ID NO: 64411 - DNA, 40 bp, Homo sapiens
cagaaaagccgaatgaggagtaacagataccccgaaaact

SEQ ID NO: 64412 - DNA, 40 bp, Homo sapiens
gttttcggggtatctgttactcctcattcggcttttctgc

SEQ ID NO: 64413 - DNA, 40 bp, Homo sapiens
gcagaaaagccgaatgaggagtaacagataccccgaaaac

SEQ ID NO: 64414 - DNA, 40 bp, Homo sapiens
ttttcggggtatctgttactcctcattcggcttttctgct

SEQ ID NO: 64415 - DNA, 40 bp, Homo sapiens
agcagaaaagccgaatgaggagtaacagataccccgaaaa

SEQ ID NO: 64416 - DNA, 40 bp, Homo sapiens
tttcggggtatctgttactcctcattcggcttttctgctc

SEQ ID NO: 64417 - DNA, 40 bp, Homo sapiens
gagcagaaaagccgaatgaggagtaacagataccccgaaa

SEQ ID NO: 64418 - DNA, 40 bp, Homo sapiens
ttcggggtatctgttactcctcattcggcttttctgctct

SEQ ID NO: 64419 - DNA, 40 bp, Homo sapiens
agagcagaaaagccgaatgaggagtaacagataccccgaa

SEQ ID NO: 64420 - DNA, 40 bp, Homo sapiens
tcggggtatctgttactcctcattcggcttttctgctctc

SEQ ID NO: 64421 - DNA, 40 bp, Homo sapiens
gagagcagaaaagccgaatgaggagtaacagataccccga

SEQ ID NO: 64422 - DNA, 40 bp, Homo sapiens
cggggtatctgttactcctcattcggcttttctgctctct

SEQ ID NO: 64423 - DNA, 40 bp, Homo sapiens
agagagcagaaaagccgaatgaggagtaacagataccccg

SEQ ID NO: 64424 - DNA, 40 bp, Homo sapiens
ggggtatctgttactcctcattcggcttttctgctctctg

SEQ ID NO: 64425 - DNA, 40 bp, Homo sapiens
cagagagcagaaaagccgaatgaggagtaacagatacccc

SEQ ID NO: 64426 - DNA, 40 bp, Homo sapiens
gggtatctgttactcctcattcggcttttctgctctctgg

SEQ ID NO: 64427 - DNA, 40 bp, Homo sapiens
ccagagagcagaaaagccgaatgaggagtaacagataccc

SEQ ID NO: 64428 - DNA, 40 bp, Homo sapiens
ggtatctgttactcctcattcggcttttctgctctctggg

SEQ ID NO: 64429 - DNA, 40 bp, Homo sapiens
cccagagagcagaaaagccgaatgaggagtaacagatacc

SEQ ID NO: 64430 - DNA, 40 bp, Homo sapiens
gtatctgttactcctcattcggcttttctgctctctgggg

SEQ ID NO: 64431 - DNA, 40 bp, Homo sapiens
ccccagagagcagaaaagccgaatgaggagtaacagatac

SEQ ID NO: 64432 - DNA, 40 bp, Homo sapiens
tatctgttactcctcattcggcttttctgctctctggggg

SEQ ID NO: 64433 - DNA, 40 bp, Homo sapiens
cccccagagagcagaaaagccgaatgaggagtaacagata

SEQ ID NO: 64434 - DNA, 40 bp, Homo sapiens
atctgttactcctcattcggcttttctgctctctgggggt

SEQ ID NO: 64435 - DNA, 40 bp, Homo sapiens
acccccagagagcagaaaagccgaatgaggagtaacagat

SEQ ID NO: 64436 - DNA, 40 bp, Homo sapiens
tctgttactcctcattcggcttttctgctctctgggggtc

SEQ ID NO: 64437 - DNA, 40 bp, Homo sapiens
gacccccagagagcagaaaagccgaatgaggagtaacaga

SEQ ID NO: 64438 - DNA, 40 bp, Homo sapiens
ctgttactcctcattcggcttttctgctctctgggggtct

SEQ ID NO: 64439 - DNA, 40 bp, Homo sapiens
agacccccagagagcagaaaagccgaatgaggagtaacag

SEQ ID NO: 64440 - DNA, 40 bp, Homo sapiens
tgttactcctcattcggcttttctgctctctgggggtctc

SEQ ID NO: 64441 - DNA, 40 bp, Homo sapiens
gagacccccagagagcagaaaagccgaatgaggagtaaca

SEQ ID NO: 64442 - DNA, 40 bp, Homo sapiens
gttactcctcattcggcttttctgctctctgggggtctca

SEQ ID NO: 64443 - DNA, 40 bp, Homo sapiens
tgagacccccagagagcagaaaagccgaatgaggagtaac

SEQ ID NO: 64444 - DNA, 40 bp, Homo sapiens
ttactcctcattcggcttttctgctctctgggggtctcaa

SEQ ID NO: 64445 - DNA, 40 bp, Homo sapiens
ttgagacccccagagagcagaaaagccgaatgaggagtaa

SEQ ID NO: 64446 - DNA, 40 bp, Homo sapiens
tactcctcattcggcttttctgctctctgggggtctcaat

SEQ ID NO: 64447 - DNA, 40 bp, Homo sapiens
attgagacccccagagagcagaaaagccgaatgaggagta

SEQ ID NO: 64448 - DNA, 40 bp, Homo sapiens
actcctcattcggcttttctgctctctgggggtctcaatt

SEQ ID NO: 64449 - DNA, 40 bp, Homo sapiens
aattgagacccccagagagcagaaaagccgaatgaggagt

SEQ ID NO: 64450 - DNA, 40 bp, Homo sapiens
ctcctcattcggcttttctgctctctgggggtctcaattt

SEQ ID NO: 64451 - DNA, 40 bp, Homo sapiens
aaattgagacccccagagagcagaaaagccgaatgaggag

SEQ ID NO: 64452 - DNA, 40 bp, Homo sapiens
tcctcattcggcttttctgctctctgggggtctcaattta

SEQ ID NO: 64453 - DNA, 40 bp, Homo sapiens
taaattgagacccccagagagcagaaaagccgaatgagga

SEQ ID NO: 64454 - DNA, 40 bp, Homo sapiens
cctcattcggcttttctgctctctgggggtctcaatttaa

SEQ ID NO: 64455 - DNA, 40 bp, Homo sapiens
ttaaattgagacccccagagagcagaaaagccgaatgagg

SEQ ID NO: 64456 - DNA, 40 bp, Homo sapiens
ctcattcggcttttctgctctctgggggtctcaatttaaa

SEQ ID NO: 64457 - DNA, 40 bp, Homo sapiens
tttaaattgagacccccagagagcagaaaagccgaatgag

SEQ ID NO: 64458 - DNA, 40 bp, Homo sapiens
tcattcggcttttctgctctctgggggtctcaatttaaat

SEQ ID NO: 64459 - DNA, 40 bp, Homo sapiens
atttaaattgagacccccagagagcagaaaagccgaatga

SEQ ID NO: 64460 - DNA, 40 bp, Homo sapiens
cattcggcttttctgctctctgggggtctcaatttaaata

SEQ ID NO: 64461 - DNA, 40 bp, Homo sapiens
tatttaaattgagacccccagagagcagaaaagccgaatg

SEQ ID NO: 64462 - DNA, 40 bp, Homo sapiens
attcggcttttctgctctctgggggtctcaatttaaatat

SEQ ID NO: 64463 - DNA, 40 bp, Homo sapiens
atatttaaattgagacccccagagagcagaaaagccgaat

SEQ ID NO: 64464 - DNA, 40 bp, Homo sapiens
ttcggcttttctgctctctgggggtctcaatttaaatata

SEQ ID NO: 64465 - DNA, 40 bp, Homo sapiens
tatatttaaattgagacccccagagagcagaaaagccgaa

SEQ ID NO: 64466 - DNA, 40 bp, Homo sapiens
tcggcttttctgctctctgggggtctcaatttaaatataa

SEQ ID NO: 64467 - DNA, 40 bp, Homo sapiens
ttatatttaaattgagacccccagagagcagaaaagccga

SEQ ID NO: 64468 - DNA, 40 bp, Homo sapiens
cggcttttctgctctctgggggtctcaatttaaatataat

SEQ ID NO: 64469 - DNA, 40 bp, Homo sapiens
attatatttaaattgagacccccagagagcagaaaagccg

SEQ ID NO: 64470 - DNA, 40 bp, Homo sapiens
ggcttttctgctctctgggggtctcaatttaaatataatg

SEQ ID NO: 64471 - DNA, 40 bp, Homo sapiens
cattatatttaaattgagacccccagagagcagaaaagcc

SEQ ID NO: 64472 - DNA, 40 bp, Homo sapiens
gcttttctgctctctgggggtctcaatttaaatataatgt

SEQ ID NO: 64473 - DNA, 40 bp, Homo sapiens
acattatatttaaattgagacccccagagagcagaaaagc

SEQ ID NO: 64474 - DNA, 40 bp, Homo sapiens
cttttctgctctctgggggtctcaatttaaatataatgtg

SEQ ID NO: 64475 - DNA, 40 bp, Homo sapiens
cacattatatttaaattgagacccccagagagcagaaaag

SEQ ID NO: 64476 - DNA, 40 bp, Homo sapiens
ttttctgctctctgggggtctcaatttaaatataatgtga

SEQ ID NO: 64477 - DNA, 40 bp, Homo sapiens
tcacattatatttaaattgagacccccagagagcagaaaa

SEQ ID NO: 64478 - DNA, 40 bp, Homo sapiens
tttctgctctctgggggtctcaatttaaatataatgtgaa

SEQ ID NO: 64479 - DNA, 40 bp, Homo sapiens
ttcacattatatttaaattgagacccccagagagcagaaa

SEQ ID NO: 64480 - DNA, 40 bp, Homo sapiens
ttctgctctctgggggtctcaatttaaatataatgtgaaa

SEQ ID NO: 64481 - DNA, 40 bp, Homo sapiens
tttcacattatatttaaattgagacccccagagagcagaa

SEQ ID NO: 64482 - DNA, 40 bp, Homo sapiens
tctgctctctgggggtctcaatttaaatataatgtgaaaa

SEQ ID NO: 64483 - DNA, 40 bp, Homo sapiens
ttttcacattatatttaaattgagacccccagagagcaga

SEQ ID NO: 64484 - DNA, 40 bp, Homo sapiens
ctgctctctgggggtctcaatttaaatataatgtgaaaat

SEQ ID NO: 64485 - DNA, 40 bp, Homo sapiens
attttcacattatatttaaattgagacccccagagagcag

SEQ ID NO: 64486 - DNA, 40 bp, Homo sapiens
tgctctctgggggtctcaatttaaatataatgtgaaaatt

SEQ ID NO: 64487 - DNA, 40 bp, Homo sapiens
aattttcacattatatttaaattgagacccccagagagca

SEQ ID NO: 64488 - DNA, 40 bp, Homo sapiens
gctctctgggggtctcaatttaaatataatgtgaaaatta

SEQ ID NO: 64489 - DNA, 40 bp, Homo sapiens
taattttcacattatatttaaattgagacccccagagagc

SEQ ID NO: 64490 - DNA, 40 bp, Homo sapiens
ctctctgggggtctcaatttaaatataatgtgaaaattag

SEQ ID NO: 64491 - DNA, 40 bp, Homo sapiens
ctaattttcacattatatttaaattgagacccccagagag

SEQ ID NO: 64492 - DNA, 40 bp, Homo sapiens
tctctgggggtctcaatttaaatataatgtgaaaattagt

SEQ ID NO: 64493 - DNA, 40 bp, Homo sapiens
actaattttcacattatatttaaattgagacccccagaga

SEQ ID NO: 64494 - DNA, 40 bp, Homo sapiens
ctctgggggtctcaatttaaatataatgtgaaaattagtt

SEQ ID NO: 64495 - DNA, 40 bp, Homo sapiens
aactaattttcacattatatttaaattgagacccccagag

SEQ ID NO: 64496 - DNA, 40 bp, Homo sapiens
tctgggggtctcaatttaaatataatgtgaaaattagttt

SEQ ID NO: 64497 - DNA, 40 bp, Homo sapiens
aaactaattttcacattatatttaaattgagacccccaga

SEQ ID NO: 64498 - DNA, 40 bp, Homo sapiens
ctgggggtctcaatttaaatataatgtgaaaattagtttt

SEQ ID NO: 64499 - DNA, 40 bp, Homo sapiens
aaaactaattttcacattatatttaaattgagacccccag

SEQ ID NO: 64500 - DNA, 40 bp, Homo sapiens
tgggggtctcaatttaaatataatgtgaaaattagtttta

SEQ ID NO: 64501 - DNA, 40 bp, Homo sapiens
taaaactaattttcacattatatttaaattgagaccccca

SEQ ID NO: 64502 - DNA, 40 bp, Homo sapiens
gggggtctcaatttaaatataatgtgaaaattagttttac

SEQ ID NO: 64503 - DNA, 40 bp, Homo sapiens
gtaaaactaattttcacattatatttaaattgagaccccc

SEQ ID NO: 64504 - DNA, 40 bp, Homo sapiens
ggggtctcaatttaaatataatgtgaaaattagttttacg

SEQ ID NO: 64505 - DNA, 40 bp, Homo sapiens
cgtaaaactaattttcacattatatttaaattgagacccc

SEQ ID NO: 64506 - DNA, 40 bp, Homo sapiens
gggtctcaatttaaatataatgtgaaaattagttttacga

SEQ ID NO: 64507 - DNA, 40 bp, Homo sapiens
tcgtaaaactaattttcacattatatttaaattgagaccc

SEQ ID NO: 64508 - DNA, 40 bp, Homo sapiens
ggtctcaatttaaatataatgtgaaaattagttttacgaa

SEQ ID NO: 64509 - DNA, 40 bp, Homo sapiens
ttcgtaaaactaattttcacattatatttaaattgagacc

SEQ ID NO: 64510 - DNA, 40 bp, Homo sapiens
gtctcaatttaaatataatgtgaaaattagttttacgaac

SEQ ID NO: 64511 - DNA, 40 bp, Homo sapiens
gttcgtaaaactaattttcacattatatttaaattgagac

SEQ ID NO: 64512 - DNA, 40 bp, Homo sapiens
tctcaatttaaatataatgtgaaaattagttttacgaacc

SEQ ID NO: 64513 - DNA, 40 bp, Homo sapiens
ggttcgtaaaactaattttcacattatatttaaattgaga

SEQ ID NO: 64514 - DNA, 40 bp, Homo sapiens
ctcaatttaaatataatgtgaaaattagttttacgaacct

SEQ ID NO: 64515 - DNA, 40 bp, Homo sapiens
aggttcgtaaaactaattttcacattatatttaaattgag

SEQ ID NO: 64516 - DNA, 40 bp, Homo sapiens
tcaatttaaatataatgtgaaaattagttttacgaaccta

SEQ ID NO: 64517 - DNA, 40 bp, Homo sapiens
taggttcgtaaaactaattttcacattatatttaaattga

SEQ ID NO: 64518 - DNA, 40 bp, Homo sapiens
caatttaaatataatgtgaaaattagttttacgaacctaa

SEQ ID NO: 64519 - DNA, 40 bp, Homo sapiens
ttaggttcgtaaaactaattttcacattatatttaaattg

SEQ ID NO: 64520 - DNA, 40 bp, Homo sapiens
aatttaaatataatgtgaaaattagttttacgaacctaaa

SEQ ID NO: 64521 - DNA, 40 bp, Homo sapiens
tttaggttcgtaaaactaattttcacattatatttaaatt

SEQ ID NO: 64522 - DNA, 40 bp, Homo sapiens
atttaaatataatgtgaaaattagttttacgaacctaaaa

SEQ ID NO: 64523 - DNA, 40 bp, Homo sapiens
ttttaggttcgtaaaactaattttcacattatatttaaat

SEQ ID NO: 64524 - DNA, 40 bp, Homo sapiens
tttaaatataatgtgaaaattagttttacgaacctaaaaa

SEQ ID NO: 64525 - DNA, 40 bp, Homo sapiens
tttttaggttcgtaaaactaattttcacattatatttaaa

SEQ ID NO: 64526 - DNA, 40 bp, Homo sapiens
ttaaatataatgtgaaaattagttttacgaacctaaaaat

SEQ ID NO: 64527 - DNA, 40 bp, Homo sapiens
atttttaggttcgtaaaactaattttcacattatatttaa

SEQ ID NO: 64528 - DNA, 40 bp, Homo sapiens
taaatataatgtgaaaattagttttacgaacctaaaaatg

SEQ ID NO: 64529 - DNA, 40 bp, Homo sapiens
catttttaggttcgtaaaactaattttcacattatattta

SEQ ID NO: 64530 - DNA, 40 bp, Homo sapiens
aaatataatgtgaaaattagttttacgaacctaaaaatgt

SEQ ID NO: 64531 - DNA, 40 bp, Homo sapiens
acatttttaggttcgtaaaactaattttcacattatattt

SEQ ID NO: 64532 - DNA, 40 bp, Homo sapiens
aatataatgtgaaaattagttttacgaacctaaaaatgtt

SEQ ID NO: 64533 - DNA, 40 bp, Homo sapiens
aacatttttaggttcgtaaaactaattttcacattatatt

SEQ ID NO: 64534 - DNA, 40 bp, Homo sapiens
atataatgtgaaaattagttttacgaacctaaaaatgttg

SEQ ID NO: 64535 - DNA, 40 bp, Homo sapiens
caacatttttaggttcgtaaaactaattttcacattatat

SEQ ID NO: 64536 - DNA, 40 bp, Homo sapiens
tataatgtgaaaattagttttacgaacctaaaaatgttga

SEQ ID NO: 64537 - DNA, 40 bp, Homo sapiens
tcaacatttttaggttcgtaaaactaattttcacattata

SEQ ID NO: 64538 - DNA, 40 bp, Homo sapiens
ataatgtgaaaattagttttacgaacctaaaaatgttgag

SEQ ID NO: 64539 - DNA, 40 bp, Homo sapiens
ctcaacatttttaggttcgtaaaactaattttcacattat

SEQ ID NO: 64540 - DNA, 40 bp, Homo sapiens
taatgtgaaaattagttttacgaacctaaaaatgttgagt

SEQ ID NO: 64541 - DNA, 40 bp, Homo sapiens
actcaacatttttaggttcgtaaaactaattttcacatta

SEQ ID NO: 64542 - DNA, 40 bp, Homo sapiens
aatgtgaaaattagttttacgaacctaaaaatgttgagtg

SEQ ID NO: 64543 - DNA, 40 bp, Homo sapiens
cactcaacatttttaggttcgtaaaactaattttcacatt

SEQ ID NO: 64544 - DNA, 40 bp, Homo sapiens
atgtgaaaattagttttacgaacctaaaaatgttgagtga

SEQ ID NO: 64545 - DNA, 40 bp, Homo sapiens
tcactcaacatttttaggttcgtaaaactaattttcacat

SEQ ID NO: 64546 - DNA, 40 bp, Homo sapiens
tgtgaaaattagttttacgaacctaaaaatgttgagtgat

SEQ ID NO: 64547 - DNA, 40 bp, Homo sapiens
atcactcaacatttttaggttcgtaaaactaattttcaca

SEQ ID NO: 64548 - DNA, 40 bp, Homo sapiens
gtgaaaattagttttacgaacctaaaaatgttgagtgatt

SEQ ID NO: 64549 - DNA, 40 bp, Homo sapiens
aatcactcaacatttttaggttcgtaaaactaattttcac

SEQ ID NO: 64550 - DNA, 40 bp, Homo sapiens
tgaaaattagttttacgaacctaaaaatgttgagtgattc

SEQ ID NO: 64551 - DNA, 40 bp, Homo sapiens
gaatcactcaacatttttaggttcgtaaaactaattttca

SEQ ID NO: 64552 - DNA, 40 bp, Homo sapiens
gaaaattagttttacgaacctaaaaatgttgagtgattca

SEQ ID NO: 64553 - DNA, 40 bp, Homo sapiens
tgaatcactcaacatttttaggttcgtaaaactaattttc

SEQ ID NO: 64554 - DNA, 40 bp, Homo sapiens
aaaattagttttacgaacctaaaaatgttgagtgattcat

SEQ ID NO: 64555 - DNA, 40 bp, Homo sapiens
atgaatcactcaacatttttaggttcgtaaaactaatttt

SEQ ID NO: 64556 - DNA, 40 bp, Homo sapiens
aaattagttttacgaacctaaaaatgttgagtgattcatt

SEQ ID NO: 64557 - DNA, 40 bp, Homo sapiens
aatgaatcactcaacatttttaggttcgtaaaactaattt

SEQ ID NO: 64558 - DNA, 40 bp, Homo sapiens
aattagttttacgaacctaaaaatgttgagtgattcattt

SEQ ID NO: 64559 - DNA, 40 bp, Homo sapiens
aaatgaatcactcaacatttttaggttcgtaaaactaatt

SEQ ID NO: 64560 - DNA, 40 bp, Homo sapiens
attagttttacgaacctaaaaatgttgagtgattcatttc

SEQ ID NO: 64561 - DNA, 40 bp, Homo sapiens
gaaatgaatcactcaacatttttaggttcgtaaaactaat

SEQ ID NO: 64562 - DNA, 40 bp, Homo sapiens
ttagttttacgaacctaaaaatgttgagtgattcatttcc

SEQ ID NO: 64563 - DNA, 40 bp, Homo sapiens
ggaaatgaatcactcaacatttttaggttcgtaaaactaa

SEQ ID NO: 64564 - DNA, 40 bp, Homo sapiens
tagttttacgaacctaaaaatgttgagtgattcatttcct

SEQ ID NO: 64565 - DNA, 40 bp, Homo sapiens
aggaaatgaatcactcaacatttttaggttcgtaaaacta

SEQ ID NO: 64566 - DNA, 40 bp, Homo sapiens
agttttacgaacctaaaaatgttgagtgattcatttcctg

SEQ ID NO: 64567 - DNA, 40 bp, Homo sapiens
caggaaatgaatcactcaacatttttaggttcgtaaaact

SEQ ID NO: 64568 - DNA, 40 bp, Homo sapiens
gttttacgaacctaaaaatgttgagtgattcatttcctgg

SEQ ID NO: 64569 - DNA, 40 bp, Homo sapiens
ccaggaaatgaatcactcaacatttttaggttcgtaaaac

SEQ ID NO: 64570 - DNA, 40 bp, Homo sapiens
ttttacgaacctaaaaatgttgagtgattcatttcctggt

SEQ ID NO: 64571 - DNA, 40 bp, Homo sapiens
accaggaaatgaatcactcaacatttttaggttcgtaaaa

SEQ ID NO: 64572 - DNA, 40 bp, Homo sapiens
tttacgaacctaaaaatgttgagtgattcatttcctggtt

SEQ ID NO: 64573 - DNA, 40 bp, Homo sapiens
aaccaggaaatgaatcactcaacatttttaggttcgtaaa

SEQ ID NO: 64574 - DNA, 40 bp, Homo sapiens
ttacgaacctaaaaatgttgagtgattcatttcctggttt

SEQ ID NO: 64575 - DNA, 40 bp, Homo sapiens
aaaccaggaaatgaatcactcaacatttttaggttcgtaa

SEQ ID NO: 64576 - DNA, 40 bp, Homo sapiens
tacgaacctaaaaatgttgagtgattcatttcctggtttt

SEQ ID NO: 64577 - DNA, 40 bp, Homo sapiens
aaaaccaggaaatgaatcactcaacatttttaggttcgta

SEQ ID NO: 64578 - DNA, 40 bp, Homo sapiens
acgaacctaaaaatgttgagtgattcatttcctggttttg

SEQ ID NO: 64579 - DNA, 40 bp, Homo sapiens
caaaaccaggaaatgaatcactcaacatttttaggttcgt

SEQ ID NO: 64580 - DNA, 40 bp, Homo sapiens
cgaacctaaaaatgttgagtgattcatttcctggttttgt

SEQ ID NO: 64581 - DNA, 40 bp, Homo sapiens
acaaaaccaggaaatgaatcactcaacatttttaggttcg

SEQ ID NO: 64582 - DNA, 40 bp, Homo sapiens
gaacctaaaaatgttgagtgattcatttcctggttttgtt

SEQ ID NO: 64583 - DNA, 40 bp, Homo sapiens
aacaaaaccaggaaatgaatcactcaacatttttaggttc

SEQ ID NO: 64584 - DNA, 40 bp, Homo sapiens
aacctaaaaatgttgagtgattcatttcctggttttgttg

SEQ ID NO: 64585 - DNA, 40 bp, Homo sapiens
caacaaaaccaggaaatgaatcactcaacatttttaggtt

SEQ ID NO: 64586 - DNA, 40 bp, Homo sapiens
acctaaaaatgttgagtgattcatttcctggttttgttgt

SEQ ID NO: 64587 - DNA, 40 bp, Homo sapiens
acaacaaaaccaggaaatgaatcactcaacatttttaggt

SEQ ID NO: 64588 - DNA, 40 bp, Homo sapiens
cctaaaaatgttgagtgattcatttcctggttttgttgtt

SEQ ID NO: 64589 - DNA, 40 bp, Homo sapiens
aacaacaaaaccaggaaatgaatcactcaacatttttagg

SEQ ID NO: 64590 - DNA, 40 bp, Homo sapiens
ctaaaaatgttgagtgattcatttcctggttttgttgtta

SEQ ID NO: 64591 - DNA, 40 bp, Homo sapiens
taacaacaaaaccaggaaatgaatcactcaacatttttag

SEQ ID NO: 64592 - DNA, 40 bp, Homo sapiens
taaaaatgttgagtgattcatttcctggttttgttgttaa

SEQ ID NO: 64593 - DNA, 40 bp, Homo sapiens
ttaacaacaaaaccaggaaatgaatcactcaacattttta

SEQ ID NO: 64594 - DNA, 40 bp, Homo sapiens
aaaaatgttgagtgattcatttcctggttttgttgttaat

SEQ ID NO: 64595 - DNA, 40 bp, Homo sapiens
attaacaacaaaaccaggaaatgaatcactcaacattttt

SEQ ID NO: 64596 - DNA, 40 bp, Homo sapiens
aaaatgttgagtgattcatttcctggttttgttgttaatt

SEQ ID NO: 64597 - DNA, 40 bp, Homo sapiens
aattaacaacaaaaccaggaaatgaatcactcaacatttt

SEQ ID NO: 64598 - DNA, 40 bp, Homo sapiens
aaatgttgagtgattcatttcctggttttgttgttaattt

SEQ ID NO: 64599 - DNA, 40 bp, Homo sapiens
aaattaacaacaaaaccaggaaatgaatcactcaacattt

SEQ ID NO: 64600 - DNA, 40 bp, Homo sapiens
aatgttgagtgattcatttcctggttttgttgttaatttc

SEQ ID NO: 64601 - DNA, 40 bp, Homo sapiens
gaaattaacaacaaaaccaggaaatgaatcactcaacatt

SEQ ID NO: 64602 - DNA, 40 bp, Homo sapiens
atgttgagtgattcatttcctggttttgttgttaatttct

SEQ ID NO: 64603 - DNA, 40 bp, Homo sapiens
agaaattaacaacaaaaccaggaaatgaatcactcaacat

SEQ ID NO: 64604 - DNA, 40 bp, Homo sapiens
tgttgagtgattcatttcctggttttgttgttaatttcta

SEQ ID NO: 64605 - DNA, 40 bp, Homo sapiens
tagaaattaacaacaaaaccaggaaatgaatcactcaaca

SEQ ID NO: 64606 - DNA, 40 bp, Homo sapiens
gttgagtgattcatttcctggttttgttgttaatttctag

SEQ ID NO: 64607 - DNA, 40 bp, Homo sapiens
ctagaaattaacaacaaaaccaggaaatgaatcactcaac

SEQ ID NO: 64608 - DNA, 40 bp, Homo sapiens
ttgagtgattcatttcctggttttgttgttaatttctaga

SEQ ID NO: 64609 - DNA, 40 bp, Homo sapiens
tctagaaattaacaacaaaaccaggaaatgaatcactcaa

SEQ ID NO: 64610 - DNA, 40 bp, Homo sapiens
tgagtgattcatttcctggttttgttgttaatttctagat

SEQ ID NO: 64611 - DNA, 40 bp, Homo sapiens
atctagaaattaacaacaaaaccaggaaatgaatcactca

SEQ ID NO: 64612 - DNA, 40 bp, Homo sapiens
gagtgattcatttcctggttttgttgttaatttctagata

SEQ ID NO: 64613 - DNA, 40 bp, Homo sapiens
tatctagaaattaacaacaaaaccaggaaatgaatcactc

SEQ ID NO: 64614 - DNA, 40 bp, Homo sapiens
agtgattcatttcctggttttgttgttaatttctagatat

SEQ ID NO: 64615 - DNA, 40 bp, Homo sapiens
atatctagaaattaacaacaaaaccaggaaatgaatcact

SEQ ID NO: 64616 - DNA, 40 bp, Homo sapiens
gtgattcatttcctggttttgttgttaatttctagatatt

SEQ ID NO: 64617 - DNA, 40 bp, Homo sapiens
aatatctagaaattaacaacaaaaccaggaaatgaatcac

SEQ ID NO: 64618 - DNA, 40 bp, Homo sapiens
tgattcatttcctggttttgttgttaatttctagatattt

SEQ ID NO: 64619 - DNA, 40 bp, Homo sapiens
aaatatctagaaattaacaacaaaaccaggaaatgaatca

SEQ ID NO: 64620 - DNA, 40 bp, Homo sapiens
gattcatttcctggttttgttgttaatttctagatattta

SEQ ID NO: 64621 - DNA, 40 bp, Homo sapiens
taaatatctagaaattaacaacaaaaccaggaaatgaatc

SEQ ID NO: 64622 - DNA, 40 bp, Homo sapiens
attcatttcctggttttgttgttaatttctagatatttaa

SEQ ID NO: 64623 - DNA, 40 bp, Homo sapiens
ttaaatatctagaaattaacaacaaaaccaggaaatgaat

SEQ ID NO: 64624 - DNA, 40 bp, Homo sapiens
ttcatttcctggttttgttgttaatttctagatatttaaa

SEQ ID NO: 64625 - DNA, 40 bp, Homo sapiens
tttaaatatctagaaattaacaacaaaaccaggaaatgaa

SEQ ID NO: 64626 - DNA, 40 bp, Homo sapiens
tcatttcctggttttgttgttaatttctagatatttaaat

SEQ ID NO: 64627 - DNA, 40 bp, Homo sapiens
atttaaatatctagaaattaacaacaaaaccaggaaatga

SEQ ID NO: 64628 - DNA, 40 bp, Homo sapiens
catttcctggttttgttgttaatttctagatatttaaatt

SEQ ID NO: 64629 - DNA, 40 bp, Homo sapiens
aatttaaatatctagaaattaacaacaaaaccaggaaatg

SEQ ID NO: 64630 - DNA, 40 bp, Homo sapiens
atttcctggttttgttgttaatttctagatatttaaatta

SEQ ID NO: 64631 - DNA, 40 bp, Homo sapiens
taatttaaatatctagaaattaacaacaaaaccaggaaat

SEQ ID NO: 64632 - DNA, 40 bp, Homo sapiens
tttcctggttttgttgttaatttctagatatttaaattaa

SEQ ID NO: 64633 - DNA, 40 bp, Homo sapiens
ttaatttaaatatctagaaattaacaacaaaaccaggaaa

SEQ ID NO: 64634 - DNA, 40 bp, Homo sapiens
ttcctggttttgttgttaatttctagatatttaaattaat

SEQ ID NO: 64635 - DNA, 40 bp, Homo sapiens
attaatttaaatatctagaaattaacaacaaaaccaggaa

SEQ ID NO: 64636 - DNA, 40 bp, Homo sapiens
tcctggttttgttgttaatttctagatatttaaattaatt

SEQ ID NO: 64637 - DNA, 40 bp, Homo sapiens
aattaatttaaatatctagaaattaacaacaaaaccagga

SEQ ID NO: 64638 - DNA, 40 bp, Homo sapiens
cctggttttgttgttaatttctagatatttaaattaattg

SEQ ID NO: 64639 - DNA, 40 bp, Homo sapiens
caattaatttaaatatctagaaattaacaacaaaaccagg

SEQ ID NO: 64640 - DNA, 40 bp, Homo sapiens
ctggttttgttgttaatttctagatatttaaattaattgt

SEQ ID NO: 64641 - DNA, 40 bp, Homo sapiens
acaattaatttaaatatctagaaattaacaacaaaaccag

SEQ ID NO: 64642 - DNA, 40 bp, Homo sapiens
tggttttgttgttaatttctagatatttaaattaattgtt

SEQ ID NO: 64643 - DNA, 40 bp, Homo sapiens
aacaattaatttaaatatctagaaattaacaacaaaacca

SEQ ID NO: 64644 - DNA, 40 bp, Homo sapiens
ggttttgttgttaatttctagatatttaaattaattgtta

SEQ ID NO: 64645 - DNA, 40 bp, Homo sapiens
taacaattaatttaaatatctagaaattaacaacaaaacc

SEQ ID NO: 64646 - DNA, 40 bp, Homo sapiens
gttttgttgttaatttctagatatttaaattaattgttag

SEQ ID NO: 64647 - DNA, 40 bp, Homo sapiens
ctaacaattaatttaaatatctagaaattaacaacaaaac

SEQ ID NO: 64648 - DNA, 40 bp, Homo sapiens
ttttgttgttaatttctagatatttaaattaattgttaga

SEQ ID NO: 64649 - DNA, 40 bp, Homo sapiens
tctaacaattaatttaaatatctagaaattaacaacaaaa

SEQ ID NO: 64650 - DNA, 40 bp, Homo sapiens
tttgttgttaatttctagatatttaaattaattgttagaa

SEQ ID NO: 64651 - DNA, 40 bp, Homo sapiens
ttctaacaattaatttaaatatctagaaattaacaacaaa

SEQ ID NO: 64652 - DNA, 40 bp, Homo sapiens
ttgttgttaatttctagatatttaaattaattgttagaag

SEQ ID NO: 64653 - DNA, 40 bp, Homo sapiens
cttctaacaattaatttaaatatctagaaattaacaacaa

SEQ ID NO: 64654 - DNA, 40 bp, Homo sapiens
tgttgttaatttctagatatttaaattaattgttagaaga

SEQ ID NO: 64655 - DNA, 40 bp, Homo sapiens
tcttctaacaattaatttaaatatctagaaattaacaaca

SEQ ID NO: 64656 - DNA, 40 bp, Homo sapiens
gttgttaatttctagatatttaaattaattgttagaagaa

SEQ ID NO: 64657 - DNA, 40 bp, Homo sapiens
ttcttctaacaattaatttaaatatctagaaattaacaac

SEQ ID NO: 64658 - DNA, 40 bp, Homo sapiens
ttgttaatttctagatatttaaattaattgttagaagaac

SEQ ID NO: 64659 - DNA, 40 bp, Homo sapiens
gttcttctaacaattaatttaaatatctagaaattaacaa

SEQ ID NO: 64660 - DNA, 40 bp, Homo sapiens
tgttaatttctagatatttaaattaattgttagaagaacc

SEQ ID NO: 64661 - DNA, 40 bp, Homo sapiens
ggttcttctaacaattaatttaaatatctagaaattaaca

SEQ ID NO: 64662 - DNA, 40 bp, Homo sapiens
gttaatttctagatatttaaattaattgttagaagaaccc

SEQ ID NO: 64663 - DNA, 40 bp, Homo sapiens
gggttcttctaacaattaatttaaatatctagaaattaac

SEQ ID NO: 64664 - DNA, 40 bp, Homo sapiens
ttaatttctagatatttaaattaattgttagaagaacccc

SEQ ID NO: 64665 - DNA, 40 bp, Homo sapiens
ggggttcttctaacaattaatttaaatatctagaaattaa

SEQ ID NO: 64666 - DNA, 40 bp, Homo sapiens
taatttctagatatttaaattaattgttagaagaaccccg

SEQ ID NO: 64667 - DNA, 40 bp, Homo sapiens
cggggttcttctaacaattaatttaaatatctagaaatta

SEQ ID NO: 64668 - DNA, 40 bp, Homo sapiens
aatttctagatatttaaattaattgttagaagaaccccgt

SEQ ID NO: 64669 - DNA, 40 bp, Homo sapiens
acggggttcttctaacaattaatttaaatatctagaaatt

SEQ ID NO: 64670 - DNA, 40 bp, Homo sapiens
atttctagatatttaaattaattgttagaagaaccccgtt

SEQ ID NO: 64671 - DNA, 40 bp, Homo sapiens
aacggggttcttctaacaattaatttaaatatctagaaat

SEQ ID NO: 64672 - DNA, 40 bp, Homo sapiens
tttctagatatttaaattaattgttagaagaaccccgtta

SEQ ID NO: 64673 - DNA, 40 bp, Homo sapiens
taacggggttcttctaacaattaatttaaatatctagaaa

SEQ ID NO: 64674 - DNA, 40 bp, Homo sapiens
ttctagatatttaaattaattgttagaagaaccccgttaa

SEQ ID NO: 64675 - DNA, 40 bp, Homo sapiens
ttaacggggttcttctaacaattaatttaaatatctagaa

SEQ ID NO: 64676 - DNA, 40 bp, Homo sapiens
tctagatatttaaattaattgttagaagaaccccgttaaa

SEQ ID NO: 64677 - DNA, 40 bp, Homo sapiens
tttaacggggttcttctaacaattaatttaaatatctaga

SEQ ID NO: 64678 - DNA, 40 bp, Homo sapiens
ctagatatttaaattaattgttagaagaaccccgttaaag

SEQ ID NO: 64679 - DNA, 40 bp, Homo sapiens
ctttaacggggttcttctaacaattaatttaaatatctag

SEQ ID NO: 64680 - DNA, 40 bp, Homo sapiens
tagatatttaaattaattgttagaagaaccccgttaaaga

SEQ ID NO: 64681 - DNA, 40 bp, Homo sapiens
tctttaacggggttcttctaacaattaatttaaatatcta

SEQ ID NO: 64682 - DNA, 40 bp, Homo sapiens
agatatttaaattaattgttagaagaaccccgttaaagaa

SEQ ID NO: 64683 - DNA, 40 bp, Homo sapiens
ttctttaacggggttcttctaacaattaatttaaatatct

SEQ ID NO: 64684 - DNA, 40 bp, Homo sapiens
gatatttaaattaattgttagaagaaccccgttaaagaat

SEQ ID NO: 64685 - DNA, 40 bp, Homo sapiens
attctttaacggggttcttctaacaattaatttaaatatc

SEQ ID NO: 64686 - DNA, 40 bp, Homo sapiens
atatttaaattaattgttagaagaaccccgttaaagaatg

SEQ ID NO: 64687 - DNA, 40 bp, Homo sapiens
cattctttaacggggttcttctaacaattaatttaaatat

SEQ ID NO: 64688 - DNA, 40 bp, Homo sapiens
tatttaaattaattgttagaagaaccccgttaaagaatgc

SEQ ID NO: 64689 - DNA, 40 bp, Homo sapiens
gcattctttaacggggttcttctaacaattaatttaaata

SEQ ID NO: 64690 - DNA, 40 bp, Homo sapiens
atttaaattaattgttagaagaaccccgttaaagaatgct

SEQ ID NO: 64691 - DNA, 40 bp, Homo sapiens
agcattctttaacggggttcttctaacaattaatttaaat

SEQ ID NO: 64692 - DNA, 40 bp, Homo sapiens
tttaaattaattgttagaagaaccccgttaaagaatgctt

SEQ ID NO: 64693 - DNA, 40 bp, Homo sapiens
aagcattctttaacggggttcttctaacaattaatttaaa

SEQ ID NO: 64694 - DNA, 40 bp, Homo sapiens
ttaaattaattgttagaagaaccccgttaaagaatgcttt

SEQ ID NO: 64695 - DNA, 40 bp, Homo sapiens
aaagcattctttaacggggttcttctaacaattaatttaa

SEQ ID NO: 64696 - DNA, 40 bp, Homo sapiens
taaattaattgttagaagaaccccgttaaagaatgctttg

SEQ ID NO: 64697 - DNA, 40 bp, Homo sapiens
caaagcattctttaacggggttcttctaacaattaattta

SEQ ID NO: 64698 - DNA, 40 bp, Homo sapiens
aaattaattgttagaagaaccccgttaaagaatgctttgc

SEQ ID NO: 64699 - DNA, 40 bp, Homo sapiens
gcaaagcattctttaacggggttcttctaacaattaattt

SEQ ID NO: 64700 - DNA, 40 bp, Homo sapiens
aattaattgttagaagaaccccgttaaagaatgctttgca

SEQ ID NO: 64701 - DNA, 40 bp, Homo sapiens
tgcaaagcattctttaacggggttcttctaacaattaatt

SEQ ID NO: 64702 - DNA, 40 bp, Homo sapiens
attaattgttagaagaaccccgttaaagaatgctttgcaa

SEQ ID NO: 64703 - DNA, 40 bp, Homo sapiens
ttgcaaagcattctttaacggggttcttctaacaattaat

SEQ ID NO: 64704 - DNA, 40 bp, Homo sapiens
ttaattgttagaagaaccccgttaaagaatgctttgcaaa

SEQ ID NO: 64705 - DNA, 40 bp, Homo sapiens
tttgcaaagcattctttaacggggttcttctaacaattaa

SEQ ID NO: 64706 - DNA, 40 bp, Homo sapiens
taattgttagaagaaccccgttaaagaatgctttgcaaaa

SEQ ID NO: 64707 - DNA, 40 bp, Homo sapiens
ttttgcaaagcattctttaacggggttcttctaacaatta

SEQ ID NO: 64708 - DNA, 40 bp, Homo sapiens
aattgttagaagaaccccgttaaagaatgctttgcaaaac

SEQ ID NO: 64709 - DNA, 40 bp, Homo sapiens
gttttgcaaagcattctttaacggggttcttctaacaatt

SEQ ID NO: 64710 - DNA, 40 bp, Homo sapiens
attgttagaagaaccccgttaaagaatgctttgcaaaaca

SEQ ID NO: 64711 - DNA, 40 bp, Homo sapiens
tgttttgcaaagcattctttaacggggttcttctaacaat

SEQ ID NO: 64712 - DNA, 40 bp, Homo sapiens
ttgttagaagaaccccgttaaagaatgctttgcaaaacaa

SEQ ID NO: 64713 - DNA, 40 bp, Homo sapiens
ttgttttgcaaagcattctttaacggggttcttctaacaa

SEQ ID NO: 64714 - DNA, 40 bp, Homo sapiens
tgttagaagaaccccgttaaagaatgctttgcaaaacaac

SEQ ID NO: 64715 - DNA, 40 bp, Homo sapiens
gttgttttgcaaagcattctttaacggggttcttctaaca

SEQ ID NO: 64716 - DNA, 40 bp, Homo sapiens
gttagaagaaccccgttaaagaatgctttgcaaaacaacc

SEQ ID NO: 64717 - DNA, 40 bp, Homo sapiens
ggttgttttgcaaagcattctttaacggggttcttctaac

SEQ ID NO: 64718 - DNA, 40 bp, Homo sapiens
ttagaagaaccccgttaaagaatgctttgcaaaacaacct

SEQ ID NO: 64719 - DNA, 40 bp, Homo sapiens
aggttgttttgcaaagcattctttaacggggttcttctaa

SEQ ID NO: 64720 - DNA, 40 bp, Homo sapiens
tagaagaaccccgttaaagaatgctttgcaaaacaacctc

SEQ ID NO: 64721 - DNA, 40 bp, Homo sapiens
gaggttgttttgcaaagcattctttaacggggttcttcta

SEQ ID NO: 64722 - DNA, 40 bp, Homo sapiens
agaagaaccccgttaaagaatgctttgcaaaacaacctcc

SEQ ID NO: 64723 - DNA, 40 bp, Homo sapiens
ggaggttgttttgcaaagcattctttaacggggttcttct

SEQ ID NO: 64724 - DNA, 40 bp, Homo sapiens
gaagaaccccgttaaagaatgctttgcaaaacaacctcct

SEQ ID NO: 64725 - DNA, 40 bp, Homo sapiens
aggaggttgttttgcaaagcattctttaacggggttcttc

SEQ ID NO: 64726 - DNA, 40 bp, Homo sapiens
aagaaccccgttaaagaatgctttgcaaaacaacctcctt

SEQ ID NO: 64727 - DNA, 40 bp, Homo sapiens
aaggaggttgttttgcaaagcattctttaacggggttctt

SEQ ID NO: 64728 - DNA, 40 bp, Homo sapiens
agaaccccgttaaagaatgctttgcaaaacaacctcctta

SEQ ID NO: 64729 - DNA, 40 bp, Homo sapiens
taaggaggttgttttgcaaagcattctttaacggggttct

SEQ ID NO: 64730 - DNA, 40 bp, Homo sapiens
gaaccccgttaaagaatgctttgcaaaacaacctccttat

SEQ ID NO: 64731 - DNA, 40 bp, Homo sapiens
ataaggaggttgttttgcaaagcattctttaacggggttc

SEQ ID NO: 64732 - DNA, 40 bp, Homo sapiens
aaccccgttaaagaatgctttgcaaaacaacctccttatg

SEQ ID NO: 64733 - DNA, 40 bp, Homo sapiens
cataaggaggttgttttgcaaagcattctttaacggggtt

SEQ ID NO: 64734 - DNA, 40 bp, Homo sapiens
accccgttaaagaatgctttgcaaaacaacctccttatgt

SEQ ID NO: 64735 - DNA, 40 bp, Homo sapiens
acataaggaggttgttttgcaaagcattctttaacggggt

SEQ ID NO: 64736 - DNA, 40 bp, Homo sapiens
ccccgttaaagaatgctttgcaaaacaacctccttatgtg

SEQ ID NO: 64737 - DNA, 40 bp, Homo sapiens
cacataaggaggttgttttgcaaagcattctttaacgggg

SEQ ID NO: 64738 - DNA, 40 bp, Homo sapiens
cccgttaaagaatgctttgcaaaacaacctccttatgtgc

SEQ ID NO: 64739 - DNA, 40 bp, Homo sapiens
gcacataaggaggttgttttgcaaagcattctttaacggg

SEQ ID NO: 64740 - DNA, 40 bp, Homo sapiens
ccgttaaagaatgctttgcaaaacaacctccttatgtgct

SEQ ID NO: 64741 - DNA, 40 bp, Homo sapiens
agcacataaggaggttgttttgcaaagcattctttaacgg

SEQ ID NO: 64742 - DNA, 40 bp, Homo sapiens
cgttaaagaatgctttgcaaaacaacctccttatgtgcta

SEQ ID NO: 64743 - DNA, 40 bp, Homo sapiens
tagcacataaggaggttgttttgcaaagcattctttaacg

SEQ ID NO: 64744 - DNA, 40 bp, Homo sapiens
gttaaagaatgctttgcaaaacaacctccttatgtgctat

SEQ ID NO: 64745 - DNA, 40 bp, Homo sapiens
atagcacataaggaggttgttttgcaaagcattctttaac

SEQ ID NO: 64746 - DNA, 40 bp, Homo sapiens
ttaaagaatgctttgcaaaacaacctccttatgtgctatg

SEQ ID NO: 64747 - DNA, 40 bp, Homo sapiens
catagcacataaggaggttgttttgcaaagcattctttaa

SEQ ID NO: 64748 - DNA, 40 bp, Homo sapiens
taaagaatgctttgcaaaacaacctccttatgtgctatgt

SEQ ID NO: 64749 - DNA, 40 bp, Homo sapiens
acatagcacataaggaggttgttttgcaaagcattcttta

SEQ ID NO: 64750 - DNA, 40 bp, Homo sapiens
aaagaatgctttgcaaaacaacctccttatgtgctatgtc

SEQ ID NO: 64751 - DNA, 40 bp, Homo sapiens
gacatagcacataaggaggttgttttgcaaagcattcttt

SEQ ID NO: 64752 - DNA, 40 bp, Homo sapiens
aagaatgctttgcaaaacaacctccttatgtgctatgtct

SEQ ID NO: 64753 - DNA, 40 bp, Homo sapiens
agacatagcacataaggaggttgttttgcaaagcattctt

SEQ ID NO: 64754 - DNA, 40 bp, Homo sapiens
agaatgctttgcaaaacaacctccttatgtgctatgtctc

SEQ ID NO: 64755 - DNA, 40 bp, Homo sapiens
gagacatagcacataaggaggttgttttgcaaagcattct

SEQ ID NO: 64756 - DNA, 40 bp, Homo sapiens
gaatgctttgcaaaacaacctccttatgtgctatgtctct

SEQ ID NO: 64757 - DNA, 40 bp, Homo sapiens
agagacatagcacataaggaggttgttttgcaaagcattc

SEQ ID NO: 64758 - DNA, 40 bp, Homo sapiens
aatgctttgcaaaacaacctccttatgtgctatgtctctg

SEQ ID NO: 64759 - DNA, 40 bp, Homo sapiens
cagagacatagcacataaggaggttgttttgcaaagcatt

SEQ ID NO: 64760 - DNA, 40 bp, Homo sapiens
atgctttgcaaaacaacctccttatgtgctatgtctctgt

SEQ ID NO: 64761 - DNA, 40 bp, Homo sapiens
acagagacatagcacataaggaggttgttttgcaaagcat

SEQ ID NO: 64762 - DNA, 40 bp, Homo sapiens
tgctttgcaaaacaacctccttatgtgctatgtctctgtt

SEQ ID NO: 64763 - DNA, 40 bp, Homo sapiens
aacagagacatagcacataaggaggttgttttgcaaagca

SEQ ID NO: 64764 - DNA, 40 bp, Homo sapiens
gctttgcaaaacaacctccttatgtgctatgtctctgttt

SEQ ID NO: 64765 - DNA, 40 bp, Homo sapiens
aaacagagacatagcacataaggaggttgttttgcaaagc

SEQ ID NO: 64766 - DNA, 40 bp, Homo sapiens
ctttgcaaaacaacctccttatgtgctatgtctctgttta

SEQ ID NO: 64767 - DNA, 40 bp, Homo sapiens
taaacagagacatagcacataaggaggttgttttgcaaag

SEQ ID NO: 64768 - DNA, 40 bp, Homo sapiens
tttgcaaaacaacctccttatgtgctatgtctctgtttaa

SEQ ID NO: 64769 - DNA, 40 bp, Homo sapiens
ttaaacagagacatagcacataaggaggttgttttgcaaa

SEQ ID NO: 64770 - DNA, 40 bp, Homo sapiens
ttgcaaaacaacctccttatgtgctatgtctctgtttaat

SEQ ID NO: 64771 - DNA, 40 bp, Homo sapiens
attaaacagagacatagcacataaggaggttgttttgcaa

SEQ ID NO: 64772 - DNA, 40 bp, Homo sapiens
tgcaaaacaacctccttatgtgctatgtctctgtttaata

SEQ ID NO: 64773 - DNA, 40 bp, Homo sapiens
tattaaacagagacatagcacataaggaggttgttttgca

SEQ ID NO: 64774 - DNA, 40 bp, Homo sapiens
gcaaaacaacctccttatgtgctatgtctctgtttaatag

SEQ ID NO: 64775 - DNA, 40 bp, Homo sapiens
ctattaaacagagacatagcacataaggaggttgttttgc

SEQ ID NO: 64776 - DNA, 40 bp, Homo sapiens
caaaacaacctccttatgtgctatgtctctgtttaatagt

SEQ ID NO: 64777 - DNA, 40 bp, Homo sapiens
actattaaacagagacatagcacataaggaggttgttttg

SEQ ID NO: 64778 - DNA, 40 bp, Homo sapiens
aaaacaacctccttatgtgctatgtctctgtttaatagta

SEQ ID NO: 64779 - DNA, 40 bp, Homo sapiens
tactattaaacagagacatagcacataaggaggttgtttt

SEQ ID NO: 64780 - DNA, 40 bp, Homo sapiens
aaacaacctccttatgtgctatgtctctgtttaatagtag

SEQ ID NO: 64781 - DNA, 40 bp, Homo sapiens
ctactattaaacagagacatagcacataaggaggttgttt

SEQ ID NO: 64782 - DNA, 40 bp, Homo sapiens
aacaacctccttatgtgctatgtctctgtttaatagtagt

SEQ ID NO: 64783 - DNA, 40 bp, Homo sapiens
actactattaaacagagacatagcacataaggaggttgtt

SEQ ID NO: 64784 - DNA, 40 bp, Homo sapiens
acaacctccttatgtgctatgtctctgtttaatagtagtt

SEQ ID NO: 64785 - DNA, 40 bp, Homo sapiens
aactactattaaacagagacatagcacataaggaggttgt

SEQ ID NO: 64786 - DNA, 40 bp, Homo sapiens
caacctccttatgtgctatgtctctgtttaatagtagttg

SEQ ID NO: 64787 - DNA, 40 bp, Homo sapiens
caactactattaaacagagacatagcacataaggaggttg

SEQ ID NO: 64788 - DNA, 40 bp, Homo sapiens
aacctccttatgtgctatgtctctgtttaatagtagttga

SEQ ID NO: 64789 - DNA, 40 bp, Homo sapiens
tcaactactattaaacagagacatagcacataaggaggtt

SEQ ID NO: 64790 - DNA, 40 bp, Homo sapiens
acctccttatgtgctatgtctctgtttaatagtagttgag

SEQ ID NO: 64791 - DNA, 40 bp, Homo sapiens
ctcaactactattaaacagagacatagcacataaggaggt

SEQ ID NO: 64792 - DNA, 40 bp, Homo sapiens
cctccttatgtgctatgtctctgtttaatagtagttgagt

SEQ ID NO: 64793 - DNA, 40 bp, Homo sapiens
actcaactactattaaacagagacatagcacataaggagg

SEQ ID NO: 64794 - DNA, 40 bp, Homo sapiens
ctccttatgtgctatgtctctgtttaatagtagttgagtt

SEQ ID NO: 64795 - DNA, 40 bp, Homo sapiens
aactcaactactattaaacagagacatagcacataaggag

SEQ ID NO: 64796 - DNA, 40 bp, Homo sapiens
tccttatgtgctatgtctctgtttaatagtagttgagttt

SEQ ID NO: 64797 - DNA, 40 bp, Homo sapiens
aaactcaactactattaaacagagacatagcacataagga

SEQ ID NO: 64798 - DNA, 40 bp, Homo sapiens
ccttatgtgctatgtctctgtttaatagtagttgagtttg

SEQ ID NO: 64799 - DNA, 40 bp, Homo sapiens
caaactcaactactattaaacagagacatagcacataagg

SEQ ID NO: 64800 - DNA, 40 bp, Homo sapiens
cttatgtgctatgtctctgtttaatagtagttgagtttgt

SEQ ID NO: 64801 - DNA, 40 bp, Homo sapiens
acaaactcaactactattaaacagagacatagcacataag

SEQ ID NO: 64802 - DNA, 40 bp, Homo sapiens
ttatgtgctatgtctctgtttaatagtagttgagtttgtg

SEQ ID NO: 64803 - DNA, 40 bp, Homo sapiens
cacaaactcaactactattaaacagagacatagcacataa

SEQ ID NO: 64804 - DNA, 40 bp, Homo sapiens
tatgtgctatgtctctgtttaatagtagttgagtttgtgt

SEQ ID NO: 64805 - DNA, 40 bp, Homo sapiens
acacaaactcaactactattaaacagagacatagcacata

SEQ ID NO: 64806 - DNA, 40 bp, Homo sapiens
atgtgctatgtctctgtttaatagtagttgagtttgtgta

SEQ ID NO: 64807 - DNA, 40 bp, Homo sapiens
tacacaaactcaactactattaaacagagacatagcacat

SEQ ID NO: 64808 - DNA, 40 bp, Homo sapiens
tgtgctatgtctctgtttaatagtagttgagtttgtgtac

SEQ ID NO: 64809 - DNA, 40 bp, Homo sapiens
gtacacaaactcaactactattaaacagagacatagcaca

SEQ ID NO: 64810 - DNA, 40 bp, Homo sapiens
gtgctatgtctctgtttaatagtagttgagtttgtgtaca

SEQ ID NO: 64811 - DNA, 40 bp, Homo sapiens
tgtacacaaactcaactactattaaacagagacatagcac

SEQ ID NO: 64812 - DNA, 40 bp, Homo sapiens
tgctatgtctctgtttaatagtagttgagtttgtgtacat

SEQ ID NO: 64813 - DNA, 40 bp, Homo sapiens
atgtacacaaactcaactactattaaacagagacatagca

SEQ ID NO: 64814 - DNA, 40 bp, Homo sapiens
gctatgtctctgtttaatagtagttgagtttgtgtacatg

SEQ ID NO: 64815 - DNA, 40 bp, Homo sapiens
catgtacacaaactcaactactattaaacagagacatagc

SEQ ID NO: 64816 - DNA, 40 bp, Homo sapiens
ctatgtctctgtttaatagtagttgagtttgtgtacatga

SEQ ID NO: 64817 - DNA, 40 bp, Homo sapiens
tcatgtacacaaactcaactactattaaacagagacatag

SEQ ID NO: 64818 - DNA, 40 bp, Homo sapiens
tatgtctctgtttaatagtagttgagtttgtgtacatgag

SEQ ID NO: 64819 - DNA, 40 bp, Homo sapiens
ctcatgtacacaaactcaactactattaaacagagacata

SEQ ID NO: 64820 - DNA, 40 bp, Homo sapiens
atgtctctgtttaatagtagttgagtttgtgtacatgaga

SEQ ID NO: 64821 - DNA, 40 bp, Homo sapiens
tctcatgtacacaaactcaactactattaaacagagacat

SEQ ID NO: 64822 - DNA, 40 bp, Homo sapiens
tgtctctgtttaatagtagttgagtttgtgtacatgagat

SEQ ID NO: 64823 - DNA, 40 bp, Homo sapiens
atctcatgtacacaaactcaactactattaaacagagaca

SEQ ID NO: 64824 - DNA, 40 bp, Homo sapiens
gtctctgtttaatagtagttgagtttgtgtacatgagatc

SEQ ID NO: 64825 - DNA, 40 bp, Homo sapiens
gatctcatgtacacaaactcaactactattaaacagagac

SEQ ID NO: 64826 - DNA, 40 bp, Homo sapiens
tctctgtttaatagtagttgagtttgtgtacatgagatca

SEQ ID NO: 64827 - DNA, 40 bp, Homo sapiens
tgatctcatgtacacaaactcaactactattaaacagaga

SEQ ID NO: 64828 - DNA, 40 bp, Homo sapiens
ctctgtttaatagtagttgagtttgtgtacatgagatcaa

SEQ ID NO: 64829 - DNA, 40 bp, Homo sapiens
ttgatctcatgtacacaaactcaactactattaaacagag

SEQ ID NO: 64830 - DNA, 40 bp, Homo sapiens
tctgtttaatagtagttgagtttgtgtacatgagatcaat

SEQ ID NO: 64831 - DNA, 40 bp, Homo sapiens
attgatctcatgtacacaaactcaactactattaaacaga

SEQ ID NO: 64832 - DNA, 40 bp, Homo sapiens
ctgtttaatagtagttgagtttgtgtacatgagatcaata

SEQ ID NO: 64833 - DNA, 40 bp, Homo sapiens
tattgatctcatgtacacaaactcaactactattaaacag

SEQ ID NO: 64834 - DNA, 40 bp, Homo sapiens
tgtttaatagtagttgagtttgtgtacatgagatcaatat

SEQ ID NO: 64835 - DNA, 40 bp, Homo sapiens
atattgatctcatgtacacaaactcaactactattaaaca

SEQ ID NO: 64836 - DNA, 40 bp, Homo sapiens
gtttaatagtagttgagtttgtgtacatgagatcaatatt

SEQ ID NO: 64837 - DNA, 40 bp, Homo sapiens
aatattgatctcatgtacacaaactcaactactattaaac

SEQ ID NO: 64838 - DNA, 40 bp, Homo sapiens
tttaatagtagttgagtttgtgtacatgagatcaatattt

SEQ ID NO: 64839 - DNA, 40 bp, Homo sapiens
aaatattgatctcatgtacacaaactcaactactattaaa

SEQ ID NO: 64840 - DNA, 40 bp, Homo sapiens
ttaatagtagttgagtttgtgtacatgagatcaatatttt

SEQ ID NO: 64841 - DNA, 40 bp, Homo sapiens
aaaatattgatctcatgtacacaaactcaactactattaa

SEQ ID NO: 64842 - DNA, 40 bp, Homo sapiens
taatagtagttgagtttgtgtacatgagatcaatattttg

SEQ ID NO: 64843 - DNA, 40 bp, Homo sapiens
caaaatattgatctcatgtacacaaactcaactactatta

SEQ ID NO: 64844 - DNA, 40 bp, Homo sapiens
aatagtagttgagtttgtgtacatgagatcaatattttga

SEQ ID NO: 64845 - DNA, 40 bp, Homo sapiens
tcaaaatattgatctcatgtacacaaactcaactactatt

SEQ ID NO: 64846 - DNA, 40 bp, Homo sapiens
atagtagttgagtttgtgtacatgagatcaatattttgaa

SEQ ID NO: 64847 - DNA, 40 bp, Homo sapiens
ttcaaaatattgatctcatgtacacaaactcaactactat

SEQ ID NO: 64848 - DNA, 40 bp, Homo sapiens
tagtagttgagtttgtgtacatgagatcaatattttgaac

SEQ ID NO: 64849 - DNA, 40 bp, Homo sapiens
gttcaaaatattgatctcatgtacacaaactcaactacta

SEQ ID NO: 64850 - DNA, 40 bp, Homo sapiens
agtagttgagtttgtgtacatgagatcaatattttgaact

SEQ ID NO: 64851 - DNA, 40 bp, Homo sapiens
agttcaaaatattgatctcatgtacacaaactcaactact

SEQ ID NO: 64852 - DNA, 40 bp, Homo sapiens
gtagttgagtttgtgtacatgagatcaatattttgaacta

SEQ ID NO: 64853 - DNA, 40 bp, Homo sapiens
tagttcaaaatattgatctcatgtacacaaactcaactac

SEQ ID NO: 64854 - DNA, 40 bp, Homo sapiens
tagttgagtttgtgtacatgagatcaatattttgaactat

SEQ ID NO: 64855 - DNA, 40 bp, Homo sapiens
atagttcaaaatattgatctcatgtacacaaactcaacta

SEQ ID NO: 64856 - DNA, 40 bp, Homo sapiens
agttgagtttgtgtacatgagatcaatattttgaactata

SEQ ID NO: 64857 - DNA, 40 bp, Homo sapiens
tatagttcaaaatattgatctcatgtacacaaactcaact

SEQ ID NO: 64858 - DNA, 40 bp, Homo sapiens
gttgagtttgtgtacatgagatcaatattttgaactatag

SEQ ID NO: 64859 - DNA, 40 bp, Homo sapiens
ctatagttcaaaatattgatctcatgtacacaaactcaac

SEQ ID NO: 64860 - DNA, 40 bp, Homo sapiens
ttgagtttgtgtacatgagatcaatattttgaactatagc

SEQ ID NO: 64861 - DNA, 40 bp, Homo sapiens
gctatagttcaaaatattgatctcatgtacacaaactcaa

SEQ ID NO: 64862 - DNA, 40 bp, Homo sapiens
tgagtttgtgtacatgagatcaatattttgaactatagct

SEQ ID NO: 64863 - DNA, 40 bp, Homo sapiens
agctatagttcaaaatattgatctcatgtacacaaactca

SEQ ID NO: 64864 - DNA, 40 bp, Homo sapiens
gagtttgtgtacatgagatcaatattttgaactatagctt

SEQ ID NO: 64865 - DNA, 40 bp, Homo sapiens
aagctatagttcaaaatattgatctcatgtacacaaactc

SEQ ID NO: 64866 - DNA, 40 bp, Homo sapiens
agtttgtgtacatgagatcaatattttgaactatagcttt

SEQ ID NO: 64867 - DNA, 40 bp, Homo sapiens
aaagctatagttcaaaatattgatctcatgtacacaaact

SEQ ID NO: 64868 - DNA, 40 bp, Homo sapiens
gtttgtgtacatgagatcaatattttgaactatagctttt

SEQ ID NO: 64869 - DNA, 40 bp, Homo sapiens
aaaagctatagttcaaaatattgatctcatgtacacaaac

SEQ ID NO: 64870 - DNA, 40 bp, Homo sapiens
tttgtgtacatgagatcaatattttgaactatagcttttt

SEQ ID NO: 64871 - DNA, 40 bp, Homo sapiens
aaaaagctatagttcaaaatattgatctcatgtacacaaa

SEQ ID NO: 64872 - DNA, 40 bp, Homo sapiens
ttgtgtacatgagatcaatattttgaactatagcttttta

SEQ ID NO: 64873 - DNA, 40 bp, Homo sapiens
taaaaagctatagttcaaaatattgatctcatgtacacaa

SEQ ID NO: 64874 - DNA, 40 bp, Homo sapiens
tgtgtacatgagatcaatattttgaactatagctttttat

SEQ ID NO: 64875 - DNA, 40 bp, Homo sapiens
ataaaaagctatagttcaaaatattgatctcatgtacaca

SEQ ID NO: 64876 - DNA, 40 bp, Homo sapiens
gtgtacatgagatcaatattttgaactatagctttttatg

SEQ ID NO: 64877 - DNA, 40 bp, Homo sapiens
cataaaaagctatagttcaaaatattgatctcatgtacac

SEQ ID NO: 64878 - DNA, 40 bp, Homo sapiens
tgtacatgagatcaatattttgaactatagctttttatga

SEQ ID NO: 64879 - DNA, 40 bp, Homo sapiens
tcataaaaagctatagttcaaaatattgatctcatgtaca

SEQ ID NO: 64880 - DNA, 40 bp, Homo sapiens
gtacatgagatcaatattttgaactatagctttttatgag

SEQ ID NO: 64881 - DNA, 40 bp, Homo sapiens
ctcataaaaagctatagttcaaaatattgatctcatgtac

SEQ ID NO: 64882 - DNA, 40 bp, Homo sapiens
tacatgagatcaatattttgaactatagctttttatgagt

SEQ ID NO: 64883 - DNA, 40 bp, Homo sapiens
actcataaaaagctatagttcaaaatattgatctcatgta

SEQ ID NO: 64884 - DNA, 40 bp, Homo sapiens
acatgagatcaatattttgaactatagctttttatgagtt

SEQ ID NO: 64885 - DNA, 40 bp, Homo sapiens
aactcataaaaagctatagttcaaaatattgatctcatgt

SEQ ID NO: 64886 - DNA, 40 bp, Homo sapiens
catgagatcaatattttgaactatagctttttatgagtta

SEQ ID NO: 64887 - DNA, 40 bp, Homo sapiens
taactcataaaaagctatagttcaaaatattgatctcatg

SEQ ID NO: 64888 - DNA, 40 bp, Homo sapiens
atgagatcaatattttgaactatagctttttatgagttaa

SEQ ID NO: 64889 - DNA, 40 bp, Homo sapiens
ttaactcataaaaagctatagttcaaaatattgatctcat

SEQ ID NO: 64890 - DNA, 40 bp, Homo sapiens
tgagatcaatattttgaactatagctttttatgagttaaa

SEQ ID NO: 64891 - DNA, 40 bp, Homo sapiens
tttaactcataaaaagctatagttcaaaatattgatctca

SEQ ID NO: 64892 - DNA, 40 bp, Homo sapiens
gagatcaatattttgaactatagctttttatgagttaaaa

SEQ ID NO: 64893 - DNA, 40 bp, Homo sapiens
ttttaactcataaaaagctatagttcaaaatattgatctc

SEQ ID NO: 64894 - DNA, 40 bp, Homo sapiens
agatcaatattttgaactatagctttttatgagttaaaaa

SEQ ID NO: 64895 - DNA, 40 bp, Homo sapiens
tttttaactcataaaaagctatagttcaaaatattgatct

SEQ ID NO: 64896 - DNA, 40 bp, Homo sapiens
gatcaatattttgaactatagctttttatgagttaaaaat

SEQ ID NO: 64897 - DNA, 40 bp, Homo sapiens
atttttaactcataaaaagctatagttcaaaatattgatc

SEQ ID NO: 64898 - DNA, 40 bp, Homo sapiens
atcaatattttgaactatagctttttatgagttaaaaatt

SEQ ID NO: 64899 - DNA, 40 bp, Homo sapiens
aatttttaactcataaaaagctatagttcaaaatattgat

SEQ ID NO: 64900 - DNA, 40 bp, Homo sapiens
tcaatattttgaactatagctttttatgagttaaaaattg

SEQ ID NO: 64901 - DNA, 40 bp, Homo sapiens
caatttttaactcataaaaagctatagttcaaaatattga

SEQ ID NO: 64902 - DNA, 40 bp, Homo sapiens
caatattttgaactatagctttttatgagttaaaaattga

SEQ ID NO: 64903 - DNA, 40 bp, Homo sapiens
tcaatttttaactcataaaaagctatagttcaaaatattg

SEQ ID NO: 64904 - DNA, 40 bp, Homo sapiens
aatattttgaactatagctttttatgagttaaaaattgac

SEQ ID NO: 64905 - DNA, 40 bp, Homo sapiens
gtcaatttttaactcataaaaagctatagttcaaaatatt

SEQ ID NO: 64906 - DNA, 40 bp, Homo sapiens
atattttgaactatagctttttatgagttaaaaattgacg

SEQ ID NO: 64907 - DNA, 40 bp, Homo sapiens
cgtcaatttttaactcataaaaagctatagttcaaaatat

SEQ ID NO: 64908 - DNA, 40 bp, Homo sapiens
tattttgaactatagctttttatgagttaaaaattgacgg

SEQ ID NO: 64909 - DNA, 40 bp, Homo sapiens
ccgtcaatttttaactcataaaaagctatagttcaaaata

SEQ ID NO: 64910 - DNA, 40 bp, Homo sapiens
attttgaactatagctttttatgagttaaaaattgacgga

SEQ ID NO: 64911 - DNA, 40 bp, Homo sapiens
tccgtcaatttttaactcataaaaagctatagttcaaaat

SEQ ID NO: 64912 - DNA, 40 bp, Homo sapiens
ttttgaactatagctttttatgagttaaaaattgacggaa

SEQ ID NO: 64913 - DNA, 40 bp, Homo sapiens
ttccgtcaatttttaactcataaaaagctatagttcaaaa

SEQ ID NO: 64914 - DNA, 40 bp, Homo sapiens
tttgaactatagctttttatgagttaaaaattgacggaac

SEQ ID NO: 64915 - DNA, 40 bp, Homo sapiens
gttccgtcaatttttaactcataaaaagctatagttcaaa

SEQ ID NO: 64916 - DNA, 40 bp, Homo sapiens
ttgaactatagctttttatgagttaaaaattgacggaaca

SEQ ID NO: 64917 - DNA, 40 bp, Homo sapiens
tgttccgtcaatttttaactcataaaaagctatagttcaa

SEQ ID NO: 64918 - DNA, 40 bp, Homo sapiens
tgaactatagctttttatgagttaaaaattgacggaacag

SEQ ID NO: 64919 - DNA, 40 bp, Homo sapiens
ctgttccgtcaatttttaactcataaaaagctatagttca

SEQ ID NO: 64920 - DNA, 40 bp, Homo sapiens
gaactatagctttttatgagttaaaaattgacggaacagt

SEQ ID NO: 64921 - DNA, 40 bp, Homo sapiens
actgttccgtcaatttttaactcataaaaagctatagttc

SEQ ID NO: 64922 - DNA, 40 bp, Homo sapiens
aactatagctttttatgagttaaaaattgacggaacagtt

SEQ ID NO: 64923 - DNA, 40 bp, Homo sapiens
aactgttccgtcaatttttaactcataaaaagctatagtt

SEQ ID NO: 64924 - DNA, 40 bp, Homo sapiens
actatagctttttatgagttaaaaattgacggaacagtta

SEQ ID NO: 64925 - DNA, 40 bp, Homo sapiens
taactgttccgtcaatttttaactcataaaaagctatagt

SEQ ID NO: 64926 - DNA, 40 bp, Homo sapiens
ctatagctttttatgagttaaaaattgacggaacagttac

SEQ ID NO: 64927 - DNA, 40 bp, Homo sapiens
gtaactgttccgtcaatttttaactcataaaaagctatag

SEQ ID NO: 64928 - DNA, 40 bp, Homo sapiens
tatagctttttatgagttaaaaattgacggaacagttact

SEQ ID NO: 64929 - DNA, 40 bp, Homo sapiens
agtaactgttccgtcaatttttaactcataaaaagctata

SEQ ID NO: 64930 - DNA, 40 bp, Homo sapiens
atagctttttatgagttaaaaattgacggaacagttactg

SEQ ID NO: 64931 - DNA, 40 bp, Homo sapiens
cagtaactgttccgtcaatttttaactcataaaaagctat

SEQ ID NO: 64932 - DNA, 40 bp, Homo sapiens
tagctttttatgagttaaaaattgacggaacagttactgt

SEQ ID NO: 64933 - DNA, 40 bp, Homo sapiens
acagtaactgttccgtcaatttttaactcataaaaagcta

SEQ ID NO: 64934 - DNA, 40 bp, Homo sapiens
agctttttatgagttaaaaattgacggaacagttactgtg

SEQ ID NO: 64935 - DNA, 40 bp, Homo sapiens
cacagtaactgttccgtcaatttttaactcataaaaagct

SEQ ID NO: 64936 - DNA, 40 bp, Homo sapiens
gctttttatgagttaaaaattgacggaacagttactgtgc

SEQ ID NO: 64937 - DNA, 40 bp, Homo sapiens
gcacagtaactgttccgtcaatttttaactcataaaaagc

SEQ ID NO: 64938 - DNA, 40 bp, Homo sapiens
ctttttatgagttaaaaattgacggaacagttactgtgca

SEQ ID NO: 64939 - DNA, 40 bp, Homo sapiens
tgcacagtaactgttccgtcaatttttaactcataaaaag

SEQ ID NO: 64940 - DNA, 40 bp, Homo sapiens
tttttatgagttaaaaattgacggaacagttactgtgcac

SEQ ID NO: 64941 - DNA, 40 bp, Homo sapiens
gtgcacagtaactgttccgtcaatttttaactcataaaaa

SEQ ID NO: 64942 - DNA, 40 bp, Homo sapiens
ttttatgagttaaaaattgacggaacagttactgtgcact

SEQ ID NO: 64943 - DNA, 40 bp, Homo sapiens
agtgcacagtaactgttccgtcaatttttaactcataaaa

SEQ ID NO: 64944 - DNA, 40 bp, Homo sapiens
tttatgagttaaaaattgacggaacagttactgtgcactt

SEQ ID NO: 64945 - DNA, 40 bp, Homo sapiens
aagtgcacagtaactgttccgtcaatttttaactcataaa

SEQ ID NO: 64946 - DNA, 40 bp, Homo sapiens
ttatgagttaaaaattgacggaacagttactgtgcacttg

SEQ ID NO: 64947 - DNA, 40 bp, Homo sapiens
caagtgcacagtaactgttccgtcaatttttaactcataa

SEQ ID NO: 64948 - DNA, 40 bp, Homo sapiens
tatgagttaaaaattgacggaacagttactgtgcacttgc

SEQ ID NO: 64949 - DNA, 40 bp, Homo sapiens
gcaagtgcacagtaactgttccgtcaatttttaactcata

SEQ ID NO: 64950 - DNA, 40 bp, Homo sapiens
atgagttaaaaattgacggaacagttactgtgcacttgct

SEQ ID NO: 64951 - DNA, 40 bp, Homo sapiens
agcaagtgcacagtaactgttccgtcaatttttaactcat

SEQ ID NO: 64952 - DNA, 40 bp, Homo sapiens
tgagttaaaaattgacggaacagttactgtgcacttgctg

SEQ ID NO: 64953 - DNA, 40 bp, Homo sapiens
cagcaagtgcacagtaactgttccgtcaatttttaactca

SEQ ID NO: 64954 - DNA, 40 bp, Homo sapiens
gagttaaaaattgacggaacagttactgtgcacttgctgt

SEQ ID NO: 64955 - DNA, 40 bp, Homo sapiens
acagcaagtgcacagtaactgttccgtcaatttttaactc

SEQ ID NO: 64956 - DNA, 40 bp, Homo sapiens
agttaaaaattgacggaacagttactgtgcacttgctgtg

SEQ ID NO: 64957 - DNA, 40 bp, Homo sapiens
cacagcaagtgcacagtaactgttccgtcaatttttaact

SEQ ID NO: 64958 - DNA, 40 bp, Homo sapiens
gttaaaaattgacggaacagttactgtgcacttgctgtgc

SEQ ID NO: 64959 - DNA, 40 bp, Homo sapiens
gcacagcaagtgcacagtaactgttccgtcaatttttaac

SEQ ID NO: 64960 - DNA, 40 bp, Homo sapiens
ttaaaaattgacggaacagttactgtgcacttgctgtgca

SEQ ID NO: 64961 - DNA, 40 bp, Homo sapiens
tgcacagcaagtgcacagtaactgttccgtcaatttttaa

SEQ ID NO: 64962 - DNA, 40 bp, Homo sapiens
taaaaattgacggaacagttactgtgcacttgctgtgcac

SEQ ID NO: 64963 - DNA, 40 bp, Homo sapiens
gtgcacagcaagtgcacagtaactgttccgtcaattttta

SEQ ID NO: 64964 - DNA, 40 bp, Homo sapiens
aaaaattgacggaacagttactgtgcacttgctgtgcacc

SEQ ID NO: 64965 - DNA, 40 bp, Homo sapiens
ggtgcacagcaagtgcacagtaactgttccgtcaattttt

SEQ ID NO: 64966 - DNA, 40 bp, Homo sapiens
aaaattgacggaacagttactgtgcacttgctgtgcacca

SEQ ID NO: 64967 - DNA, 40 bp, Homo sapiens
tggtgcacagcaagtgcacagtaactgttccgtcaatttt

SEQ ID NO: 64968 - DNA, 40 bp, Homo sapiens
aaattgacggaacagttactgtgcacttgctgtgcaccat

SEQ ID NO: 64969 - DNA, 40 bp, Homo sapiens
atggtgcacagcaagtgcacagtaactgttccgtcaattt

SEQ ID NO: 64970 - DNA, 40 bp, Homo sapiens
aattgacggaacagttactgtgcacttgctgtgcaccatg

SEQ ID NO: 64971 - DNA, 40 bp, Homo sapiens
catggtgcacagcaagtgcacagtaactgttccgtcaatt

SEQ ID NO: 64972 - DNA, 40 bp, Homo sapiens
attgacggaacagttactgtgcacttgctgtgcaccatgg

SEQ ID NO: 64973 - DNA, 40 bp, Homo sapiens
ccatggtgcacagcaagtgcacagtaactgttccgtcaat

SEQ ID NO: 64974 - DNA, 40 bp, Homo sapiens
ttgacggaacagttactgtgcacttgctgtgcaccatggt

SEQ ID NO: 64975 - DNA, 40 bp, Homo sapiens
accatggtgcacagcaagtgcacagtaactgttccgtcaa

SEQ ID NO: 64976 - DNA, 40 bp, Homo sapiens
tgacggaacagttactgtgcacttgctgtgcaccatggta

SEQ ID NO: 64977 - DNA, 40 bp, Homo sapiens
taccatggtgcacagcaagtgcacagtaactgttccgtca

SEQ ID NO: 64978 - DNA, 40 bp, Homo sapiens
gacggaacagttactgtgcacttgctgtgcaccatggtag

SEQ ID NO: 64979 - DNA, 40 bp, Homo sapiens
ctaccatggtgcacagcaagtgcacagtaactgttccgtc

SEQ ID NO: 64980 - DNA, 40 bp, Homo sapiens
acggaacagttactgtgcacttgctgtgcaccatggtagt

SEQ ID NO: 64981 - DNA, 40 bp, Homo sapiens
actaccatggtgcacagcaagtgcacagtaactgttccgt

SEQ ID NO: 64982 - DNA, 40 bp, Homo sapiens
cggaacagttactgtgcacttgctgtgcaccatggtagtc

SEQ ID NO: 64983 - DNA, 40 bp, Homo sapiens
gactaccatggtgcacagcaagtgcacagtaactgttccg

SEQ ID NO: 64984 - DNA, 40 bp, Homo sapiens
ggaacagttactgtgcacttgctgtgcaccatggtagtct

SEQ ID NO: 64985 - DNA, 40 bp, Homo sapiens
agactaccatggtgcacagcaagtgcacagtaactgttcc

SEQ ID NO: 64986 - DNA, 40 bp, Homo sapiens
gaacagttactgtgcacttgctgtgcaccatggtagtctc

SEQ ID NO: 64987 - DNA, 40 bp, Homo sapiens
gagactaccatggtgcacagcaagtgcacagtaactgttc

SEQ ID NO: 64988 - DNA, 40 bp, Homo sapiens
aacagttactgtgcacttgctgtgcaccatggtagtctcc

SEQ ID NO: 64989 - DNA, 40 bp, Homo sapiens
ggagactaccatggtgcacagcaagtgcacagtaactgtt

SEQ ID NO: 64990 - DNA, 40 bp, Homo sapiens
acagttactgtgcacttgctgtgcaccatggtagtctccc

SEQ ID NO: 64991 - DNA, 40 bp, Homo sapiens
gggagactaccatggtgcacagcaagtgcacagtaactgt

SEQ ID NO: 64992 - DNA, 40 bp, Homo sapiens
cagttactgtgcacttgctgtgcaccatggtagtctccca

SEQ ID NO: 64993 - DNA, 40 bp, Homo sapiens
tgggagactaccatggtgcacagcaagtgcacagtaactg

SEQ ID NO: 64994 - DNA, 40 bp, Homo sapiens
agttactgtgcacttgctgtgcaccatggtagtctcccaa

SEQ ID NO: 64995 - DNA, 40 bp, Homo sapiens
ttgggagactaccatggtgcacagcaagtgcacagtaact

SEQ ID NO: 64996 - DNA, 40 bp, Homo sapiens
gttactgtgcacttgctgtgcaccatggtagtctcccaag

SEQ ID NO: 64997 - DNA, 40 bp, Homo sapiens
cttgggagactaccatggtgcacagcaagtgcacagtaac

SEQ ID NO: 64998 - DNA, 40 bp, Homo sapiens
ttactgtgcacttgctgtgcaccatggtagtctcccaagt

SEQ ID NO: 64999 - DNA, 40 bp, Homo sapiens
acttgggagactaccatggtgcacagcaagtgcacagtaa

SEQ ID NO: 65000 - DNA, 40 bp, Homo sapiens
tactgtgcacttgctgtgcaccatggtagtctcccaagta

SEQ ID NO: 65001 - DNA, 40 bp, Homo sapiens
tacttgggagactaccatggtgcacagcaagtgcacagta

SEQ ID NO: 65002 - DNA, 40 bp, Homo sapiens
actgtgcacttgctgtgcaccatggtagtctcccaagtag

SEQ ID NO: 65003 - DNA, 40 bp, Homo sapiens
ctacttgggagactaccatggtgcacagcaagtgcacagt

SEQ ID NO: 65004 - DNA, 40 bp, Homo sapiens
ctgtgcacttgctgtgcaccatggtagtctcccaagtagt

SEQ ID NO: 65005 - DNA, 40 bp, Homo sapiens
actacttgggagactaccatggtgcacagcaagtgcacag

SEQ ID NO: 65006 - DNA, 40 bp, Homo sapiens
tgtgcacttgctgtgcaccatggtagtctcccaagtagtg

SEQ ID NO: 65007 - DNA, 40 bp, Homo sapiens
cactacttgggagactaccatggtgcacagcaagtgcaca

SEQ ID NO: 65008 - DNA, 40 bp, Homo sapiens
gtgcacttgctgtgcaccatggtagtctcccaagtagtgg

SEQ ID NO: 65009 - DNA, 40 bp, Homo sapiens
ccactacttgggagactaccatggtgcacagcaagtgcac

SEQ ID NO: 65010 - DNA, 40 bp, Homo sapiens
tgcacttgctgtgcaccatggtagtctcccaagtagtggt

SEQ ID NO: 65011 - DNA, 40 bp, Homo sapiens
accactacttgggagactaccatggtgcacagcaagtgca

SEQ ID NO: 65012 - DNA, 40 bp, Homo sapiens
gcacttgctgtgcaccatggtagtctcccaagtagtggtt

SEQ ID NO: 65013 - DNA, 40 bp, Homo sapiens
aaccactacttgggagactaccatggtgcacagcaagtgc

SEQ ID NO: 65014 - DNA, 40 bp, Homo sapiens
cacttgctgtgcaccatggtagtctcccaagtagtggttt

SEQ ID NO: 65015 - DNA, 40 bp, Homo sapiens
aaaccactacttgggagactaccatggtgcacagcaagtg

SEQ ID NO: 65016 - DNA, 40 bp, Homo sapiens
acttgctgtgcaccatggtagtctcccaagtagtggtttt

SEQ ID NO: 65017 - DNA, 40 bp, Homo sapiens
aaaaccactacttgggagactaccatggtgcacagcaagt

SEQ ID NO: 65018 - DNA, 40 bp, Homo sapiens
cttgctgtgcaccatggtagtctcccaagtagtggttttt

SEQ ID NO: 65019 - DNA, 40 bp, Homo sapiens
aaaaaccactacttgggagactaccatggtgcacagcaag

SEQ ID NO: 65020 - DNA, 40 bp, Homo sapiens
ttgctgtgcaccatggtagtctcccaagtagtggtttttc

SEQ ID NO: 65021 - DNA, 40 bp, Homo sapiens
gaaaaaccactacttgggagactaccatggtgcacagcaa

SEQ ID NO: 65022 - DNA, 40 bp, Homo sapiens
tgctgtgcaccatggtagtctcccaagtagtggtttttct

SEQ ID NO: 65023 - DNA, 40 bp, Homo sapiens
agaaaaaccactacttgggagactaccatggtgcacagca

SEQ ID NO: 65024 - DNA, 40 bp, Homo sapiens
gctgtgcaccatggtagtctcccaagtagtggtttttctg

SEQ ID NO: 65025 - DNA, 40 bp, Homo sapiens
cagaaaaaccactacttgggagactaccatggtgcacagc

SEQ ID NO: 65026 - DNA, 40 bp, Homo sapiens
ctgtgcaccatggtagtctcccaagtagtggtttttctgc

SEQ ID NO: 65027 - DNA, 40 bp, Homo sapiens
gcagaaaaaccactacttgggagactaccatggtgcacag

SEQ ID NO: 65028 - DNA, 40 bp, Homo sapiens
tgtgcaccatggtagtctcccaagtagtggtttttctgca

SEQ ID NO: 65029 - DNA, 40 bp, Homo sapiens
tgcagaaaaaccactacttgggagactaccatggtgcaca

SEQ ID NO: 65030 - DNA, 40 bp, Homo sapiens
gtgcaccatggtagtctcccaagtagtggtttttctgcat

SEQ ID NO: 65031 - DNA, 40 bp, Homo sapiens
atgcagaaaaaccactacttgggagactaccatggtgcac

SEQ ID NO: 65032 - DNA, 40 bp, Homo sapiens
tgcaccatggtagtctcccaagtagtggtttttctgcatt

SEQ ID NO: 65033 - DNA, 40 bp, Homo sapiens
aatgcagaaaaaccactacttgggagactaccatggtgca

SEQ ID NO: 65034 - DNA, 40 bp, Homo sapiens
gcaccatggtagtctcccaagtagtggtttttctgcattt

SEQ ID NO: 65035 - DNA, 40 bp, Homo sapiens
aaatgcagaaaaaccactacttgggagactaccatggtgc

SEQ ID NO: 65036 - DNA, 40 bp, Homo sapiens
caccatggtagtctcccaagtagtggtttttctgcatttc

SEQ ID NO: 65037 - DNA, 40 bp, Homo sapiens
gaaatgcagaaaaaccactacttgggagactaccatggtg

SEQ ID NO: 65038 - DNA, 40 bp, Homo sapiens
accatggtagtctcccaagtagtggtttttctgcatttca

SEQ ID NO: 65039 - DNA, 40 bp, Homo sapiens
tgaaatgcagaaaaaccactacttgggagactaccatggt

SEQ ID NO: 65040 - DNA, 40 bp, Homo sapiens
ccatggtagtctcccaagtagtggtttttctgcatttcaa

SEQ ID NO: 65041 - DNA, 40 bp, Homo sapiens
ttgaaatgcagaaaaaccactacttgggagactaccatgg

SEQ ID NO: 65042 - DNA, 40 bp, Homo sapiens
catggtagtctcccaagtagtggtttttctgcatttcaat

SEQ ID NO: 65043 - DNA, 40 bp, Homo sapiens
attgaaatgcagaaaaaccactacttgggagactaccatg

SEQ ID NO: 65044 - DNA, 40 bp, Homo sapiens
atggtagtctcccaagtagtggtttttctgcatttcaata

SEQ ID NO: 65045 - DNA, 40 bp, Homo sapiens
tattgaaatgcagaaaaaccactacttgggagactaccat

SEQ ID NO: 65046 - DNA, 40 bp, Homo sapiens
tggtagtctcccaagtagtggtttttctgcatttcaatag

SEQ ID NO: 65047 - DNA, 40 bp, Homo sapiens
ctattgaaatgcagaaaaaccactacttgggagactacca

SEQ ID NO: 65048 - DNA, 40 bp, Homo sapiens
ggtagtctcccaagtagtggtttttctgcatttcaatagt

SEQ ID NO: 65049 - DNA, 40 bp, Homo sapiens
actattgaaatgcagaaaaaccactacttgggagactacc

SEQ ID NO: 65050 - DNA, 40 bp, Homo sapiens
gtagtctcccaagtagtggtttttctgcatttcaatagta

SEQ ID NO: 65051 - DNA, 40 bp, Homo sapiens
tactattgaaatgcagaaaaaccactacttgggagactac

SEQ ID NO: 65052 - DNA, 40 bp, Homo sapiens
tagtctcccaagtagtggtttttctgcatttcaatagtac

SEQ ID NO: 65053 - DNA, 40 bp, Homo sapiens
gtactattgaaatgcagaaaaaccactacttgggagacta

SEQ ID NO: 65054 - DNA, 40 bp, Homo sapiens
agtctcccaagtagtggtttttctgcatttcaatagtaca

SEQ ID NO: 65055 - DNA, 40 bp, Homo sapiens
tgtactattgaaatgcagaaaaaccactacttgggagact

SEQ ID NO: 65056 - DNA, 40 bp, Homo sapiens
gtctcccaagtagtggtttttctgcatttcaatagtacat

SEQ ID NO: 65057 - DNA, 40 bp, Homo sapiens
atgtactattgaaatgcagaaaaaccactacttgggagac

SEQ ID NO: 65058 - DNA, 40 bp, Homo sapiens
tctcccaagtagtggtttttctgcatttcaatagtacatg

SEQ ID NO: 65059 - DNA, 40 bp, Homo sapiens
catgtactattgaaatgcagaaaaaccactacttgggaga

SEQ ID NO: 65060 - DNA, 40 bp, Homo sapiens
ctcccaagtagtggtttttctgcatttcaatagtacatga

SEQ ID NO: 65061 - DNA, 40 bp, Homo sapiens
tcatgtactattgaaatgcagaaaaaccactacttgggag

SEQ ID NO: 65062 - DNA, 40 bp, Homo sapiens
tcccaagtagtggtttttctgcatttcaatagtacatgag

SEQ ID NO: 65063 - DNA, 40 bp, Homo sapiens
ctcatgtactattgaaatgcagaaaaaccactacttggga

SEQ ID NO: 65064 - DNA, 40 bp, Homo sapiens
cccaagtagtggtttttctgcatttcaatagtacatgaga

SEQ ID NO: 65065 - DNA, 40 bp, Homo sapiens
tctcatgtactattgaaatgcagaaaaaccactacttggg

SEQ ID NO: 65066 - DNA, 40 bp, Homo sapiens
ccaagtagtggtttttctgcatttcaatagtacatgagat

SEQ ID NO: 65067 - DNA, 40 bp, Homo sapiens
atctcatgtactattgaaatgcagaaaaaccactacttgg

SEQ ID NO: 65068 - DNA, 40 bp, Homo sapiens
caagtagtggtttttctgcatttcaatagtacatgagata

SEQ ID NO: 65069 - DNA, 40 bp, Homo sapiens
tatctcatgtactattgaaatgcagaaaaaccactacttg

SEQ ID NO: 65070 - DNA, 40 bp, Homo sapiens
aagtagtggtttttctgcatttcaatagtacatgagatag

SEQ ID NO: 65071 - DNA, 40 bp, Homo sapiens
ctatctcatgtactattgaaatgcagaaaaaccactactt

SEQ ID NO: 65072 - DNA, 40 bp, Homo sapiens
agtagtggtttttctgcatttcaatagtacatgagatagg

SEQ ID NO: 65073 - DNA, 40 bp, Homo sapiens
cctatctcatgtactattgaaatgcagaaaaaccactact

SEQ ID NO: 65074 - DNA, 40 bp, Homo sapiens
gtagtggtttttctgcatttcaatagtacatgagataggc

SEQ ID NO: 65075 - DNA, 40 bp, Homo sapiens
gcctatctcatgtactattgaaatgcagaaaaaccactac

SEQ ID NO: 65076 - DNA, 40 bp, Homo sapiens
tagtggtttttctgcatttcaatagtacatgagataggct

SEQ ID NO: 65077 - DNA, 40 bp, Homo sapiens
agcctatctcatgtactattgaaatgcagaaaaaccacta

SEQ ID NO: 65078 - DNA, 40 bp, Homo sapiens
agtggtttttctgcatttcaatagtacatgagataggctg

SEQ ID NO: 65079 - DNA, 40 bp, Homo sapiens
cagcctatctcatgtactattgaaatgcagaaaaaccact

SEQ ID NO: 65080 - DNA, 40 bp, Homo sapiens
gtggtttttctgcatttcaatagtacatgagataggctgt

SEQ ID NO: 65081 - DNA, 40 bp, Homo sapiens
acagcctatctcatgtactattgaaatgcagaaaaaccac

SEQ ID NO: 65082 - DNA, 40 bp, Homo sapiens
tggtttttctgcatttcaatagtacatgagataggctgtg

SEQ ID NO: 65083 - DNA, 40 bp, Homo sapiens
cacagcctatctcatgtactattgaaatgcagaaaaacca

SEQ ID NO: 65084 - DNA, 40 bp, Homo sapiens
ggtttttctgcatttcaatagtacatgagataggctgtgg

SEQ ID NO: 65085 - DNA, 40 bp, Homo sapiens
ccacagcctatctcatgtactattgaaatgcagaaaaacc

SEQ ID NO: 65086 - DNA, 40 bp, Homo sapiens
gtttttctgcatttcaatagtacatgagataggctgtggg

SEQ ID NO: 65087 - DNA, 40 bp, Homo sapiens
cccacagcctatctcatgtactattgaaatgcagaaaaac

SEQ ID NO: 65088 - DNA, 40 bp, Homo sapiens
tttttctgcatttcaatagtacatgagataggctgtgggt

SEQ ID NO: 65089 - DNA, 40 bp, Homo sapiens
acccacagcctatctcatgtactattgaaatgcagaaaaa

SEQ ID NO: 65090 - DNA, 40 bp, Homo sapiens
ttttctgcatttcaatagtacatgagataggctgtgggtg

SEQ ID NO: 65091 - DNA, 40 bp, Homo sapiens
cacccacagcctatctcatgtactattgaaatgcagaaaa

SEQ ID NO: 65092 - DNA, 40 bp, Homo sapiens
tttctgcatttcaatagtacatgagataggctgtgggtgg

SEQ ID NO: 65093 - DNA, 40 bp, Homo sapiens
ccacccacagcctatctcatgtactattgaaatgcagaaa

SEQ ID NO: 65094 - DNA, 40 bp, Homo sapiens
ttctgcatttcaatagtacatgagataggctgtgggtggc

SEQ ID NO: 65095 - DNA, 40 bp, Homo sapiens
gccacccacagcctatctcatgtactattgaaatgcagaa

SEQ ID NO: 65096 - DNA, 40 bp, Homo sapiens
tctgcatttcaatagtacatgagataggctgtgggtggca

SEQ ID NO: 65097 - DNA, 40 bp, Homo sapiens
tgccacccacagcctatctcatgtactattgaaatgcaga

SEQ ID NO: 65098 - DNA, 40 bp, Homo sapiens
ctgcatttcaatagtacatgagataggctgtgggtggcaa

SEQ ID NO: 65099 - DNA, 40 bp, Homo sapiens
ttgccacccacagcctatctcatgtactattgaaatgcag

SEQ ID NO: 65100 - DNA, 40 bp, Homo sapiens
tgcatttcaatagtacatgagataggctgtgggtggcaag

SEQ ID NO: 65101 - DNA, 40 bp, Homo sapiens
cttgccacccacagcctatctcatgtactattgaaatgca

SEQ ID NO: 65102 - DNA, 40 bp, Homo sapiens
gcatttcaatagtacatgagataggctgtgggtggcaagg

SEQ ID NO: 65103 - DNA, 40 bp, Homo sapiens
ccttgccacccacagcctatctcatgtactattgaaatgc

SEQ ID NO: 65104 - DNA, 40 bp, Homo sapiens
catttcaatagtacatgagataggctgtgggtggcaaggt

SEQ ID NO: 65105 - DNA, 40 bp, Homo sapiens
accttgccacccacagcctatctcatgtactattgaaatg

SEQ ID NO: 65106 - DNA, 40 bp, Homo sapiens
atttcaatagtacatgagataggctgtgggtggcaaggtt

SEQ ID NO: 65107 - DNA, 40 bp, Homo sapiens
aaccttgccacccacagcctatctcatgtactattgaaat

SEQ ID NO: 65108 - DNA, 40 bp, Homo sapiens
tttcaatagtacatgagataggctgtgggtggcaaggttt

SEQ ID NO: 65109 - DNA, 40 bp, Homo sapiens
aaaccttgccacccacagcctatctcatgtactattgaaa

SEQ ID NO: 65110 - DNA, 40 bp, Homo sapiens
ttcaatagtacatgagataggctgtgggtggcaaggtttc

SEQ ID NO: 65111 - DNA, 40 bp, Homo sapiens
gaaaccttgccacccacagcctatctcatgtactattgaa

SEQ ID NO: 65112 - DNA, 40 bp, Homo sapiens
tcaatagtacatgagataggctgtgggtggcaaggtttct

SEQ ID NO: 65113 - DNA, 40 bp, Homo sapiens
agaaaccttgccacccacagcctatctcatgtactattga

SEQ ID NO: 65114 - DNA, 40 bp, Homo sapiens
caatagtacatgagataggctgtgggtggcaaggtttctt

SEQ ID NO: 65115 - DNA, 40 bp, Homo sapiens
aagaaaccttgccacccacagcctatctcatgtactattg

SEQ ID NO: 65116 - DNA, 40 bp, Homo sapiens
aatagtacatgagataggctgtgggtggcaaggtttcttg

SEQ ID NO: 65117 - DNA, 40 bp, Homo sapiens
caagaaaccttgccacccacagcctatctcatgtactatt

SEQ ID NO: 65118 - DNA, 40 bp, Homo sapiens
atagtacatgagataggctgtgggtggcaaggtttcttga

SEQ ID NO: 65119 - DNA, 40 bp, Homo sapiens
tcaagaaaccttgccacccacagcctatctcatgtactat

SEQ ID NO: 65120 - DNA, 40 bp, Homo sapiens
tagtacatgagataggctgtgggtggcaaggtttcttgag

SEQ ID NO: 65121 - DNA, 40 bp, Homo sapiens
ctcaagaaaccttgccacccacagcctatctcatgtacta

SEQ ID NO: 65122 - DNA, 40 bp, Homo sapiens
agtacatgagataggctgtgggtggcaaggtttcttgaga

SEQ ID NO: 65123 - DNA, 40 bp, Homo sapiens
tctcaagaaaccttgccacccacagcctatctcatgtact

SEQ ID NO: 65124 - DNA, 40 bp, Homo sapiens
gtacatgagataggctgtgggtggcaaggtttcttgagaa

SEQ ID NO: 65125 - DNA, 40 bp, Homo sapiens
ttctcaagaaaccttgccacccacagcctatctcatgtac

SEQ ID NO: 65126 - DNA, 40 bp, Homo sapiens
tacatgagataggctgtgggtggcaaggtttcttgagaaa

SEQ ID NO: 65127 - DNA, 40 bp, Homo sapiens
tttctcaagaaaccttgccacccacagcctatctcatgta

SEQ ID NO: 65128 - DNA, 40 bp, Homo sapiens
acatgagataggctgtgggtggcaaggtttcttgagaaag

SEQ ID NO: 65129 - DNA, 40 bp, Homo sapiens
ctttctcaagaaaccttgccacccacagcctatctcatgt

SEQ ID NO: 65130 - DNA, 40 bp, Homo sapiens
catgagataggctgtgggtggcaaggtttcttgagaaagt

SEQ ID NO: 65131 - DNA, 40 bp, Homo sapiens
actttctcaagaaaccttgccacccacagcctatctcatg

SEQ ID NO: 65132 - DNA, 40 bp, Homo sapiens
atgagataggctgtgggtggcaaggtttcttgagaaagtg

SEQ ID NO: 65133 - DNA, 40 bp, Homo sapiens
cactttctcaagaaaccttgccacccacagcctatctcat

SEQ ID NO: 65134 - DNA, 40 bp, Homo sapiens
tgagataggctgtgggtggcaaggtttcttgagaaagtga

SEQ ID NO: 65135 - DNA, 40 bp, Homo sapiens
tcactttctcaagaaaccttgccacccacagcctatctca

SEQ ID NO: 65136 - DNA, 40 bp, Homo sapiens
gagataggctgtgggtggcaaggtttcttgagaaagtgag

SEQ ID NO: 65137 - DNA, 40 bp, Homo sapiens
ctcactttctcaagaaaccttgccacccacagcctatctc

SEQ ID NO: 65138 - DNA, 40 bp, Homo sapiens
agataggctgtgggtggcaaggtttcttgagaaagtgagg

SEQ ID NO: 65139 - DNA, 40 bp, Homo sapiens
cctcactttctcaagaaaccttgccacccacagcctatct

SEQ ID NO: 65140 - DNA, 40 bp, Homo sapiens
gataggctgtgggtggcaaggtttcttgagaaagtgaggg

SEQ ID NO: 65141 - DNA, 40 bp, Homo sapiens
ccctcactttctcaagaaaccttgccacccacagcctatc

SEQ ID NO: 65142 - DNA, 40 bp, Homo sapiens
ataggctgtgggtggcaaggtttcttgagaaagtgaggga

SEQ ID NO: 65143 - DNA, 40 bp, Homo sapiens
tccctcactttctcaagaaaccttgccacccacagcctat

SEQ ID NO: 65144 - DNA, 40 bp, Homo sapiens
taggctgtgggtggcaaggtttcttgagaaagtgagggat

SEQ ID NO: 65145 - DNA, 40 bp, Homo sapiens
atccctcactttctcaagaaaccttgccacccacagccta

SEQ ID NO: 65146 - DNA, 40 bp, Homo sapiens
aggctgtgggtggcaaggtttcttgagaaagtgagggatg

SEQ ID NO: 65147 - DNA, 40 bp, Homo sapiens
catccctcactttctcaagaaaccttgccacccacagcct

SEQ ID NO: 65148 - DNA, 40 bp, Homo sapiens
ggctgtgggtggcaaggtttcttgagaaagtgagggatgc

SEQ ID NO: 65149 - DNA, 40 bp, Homo sapiens
gcatccctcactttctcaagaaaccttgccacccacagcc

SEQ ID NO: 65150 - DNA, 40 bp, Homo sapiens
gctgtgggtggcaaggtttcttgagaaagtgagggatgca

SEQ ID NO: 65151 - DNA, 40 bp, Homo sapiens
tgcatccctcactttctcaagaaaccttgccacccacagc

SEQ ID NO: 65152 - DNA, 40 bp, Homo sapiens
ctgtgggtggcaaggtttcttgagaaagtgagggatgcac

SEQ ID NO: 65153 - DNA, 40 bp, Homo sapiens
gtgcatccctcactttctcaagaaaccttgccacccacag

SEQ ID NO: 65154 - DNA, 40 bp, Homo sapiens
tgtgggtggcaaggtttcttgagaaagtgagggatgcaca

SEQ ID NO: 65155 - DNA, 40 bp, Homo sapiens
tgtgcatccctcactttctcaagaaaccttgccacccaca

SEQ ID NO: 65156 - DNA, 40 bp, Homo sapiens
gtgggtggcaaggtttcttgagaaagtgagggatgcacag

SEQ ID NO: 65157 - DNA, 40 bp, Homo sapiens
ctgtgcatccctcactttctcaagaaaccttgccacccac

SEQ ID NO: 65158 - DNA, 40 bp, Homo sapiens
tgggtggcaaggtttcttgagaaagtgagggatgcacagt

SEQ ID NO: 65159 - DNA, 40 bp, Homo sapiens
actgtgcatccctcactttctcaagaaaccttgccaccca

SEQ ID NO: 65160 - DNA, 40 bp, Homo sapiens
gggtggcaaggtttcttgagaaagtgagggatgcacagtt

SEQ ID NO: 65161 - DNA, 40 bp, Homo sapiens
aactgtgcatccctcactttctcaagaaaccttgccaccc

SEQ ID NO: 65162 - DNA, 40 bp, Homo sapiens
ggtggcaaggtttcttgagaaagtgagggatgcacagttg

SEQ ID NO: 65163 - DNA, 40 bp, Homo sapiens
caactgtgcatccctcactttctcaagaaaccttgccacc

SEQ ID NO: 65164 - DNA, 40 bp, Homo sapiens
gtggcaaggtttcttgagaaagtgagggatgcacagttgg

SEQ ID NO: 65165 - DNA, 40 bp, Homo sapiens
ccaactgtgcatccctcactttctcaagaaaccttgccac

SEQ ID NO: 65166 - DNA, 40 bp, Homo sapiens
tggcaaggtttcttgagaaagtgagggatgcacagttggg

SEQ ID NO: 65167 - DNA, 40 bp, Homo sapiens
cccaactgtgcatccctcactttctcaagaaaccttgcca

SEQ ID NO: 65168 - DNA, 40 bp, Homo sapiens
ggcaaggtttcttgagaaagtgagggatgcacagttgggt

SEQ ID NO: 65169 - DNA, 40 bp, Homo sapiens
acccaactgtgcatccctcactttctcaagaaaccttgcc

SEQ ID NO: 65170 - DNA, 40 bp, Homo sapiens
gcaaggtttcttgagaaagtgagggatgcacagttgggtt

SEQ ID NO: 65171 - DNA, 40 bp, Homo sapiens
aacccaactgtgcatccctcactttctcaagaaaccttgc

SEQ ID NO: 65172 - DNA, 40 bp, Homo sapiens
caaggtttcttgagaaagtgagggatgcacagttgggttt

SEQ ID NO: 65173 - DNA, 40 bp, Homo sapiens
aaacccaactgtgcatccctcactttctcaagaaaccttg

SEQ ID NO: 65174 - DNA, 40 bp, Homo sapiens
aaggtttcttgagaaagtgagggatgcacagttgggtttt

SEQ ID NO: 65175 - DNA, 40 bp, Homo sapiens
aaaacccaactgtgcatccctcactttctcaagaaacctt

SEQ ID NO: 65176 - DNA, 40 bp, Homo sapiens
aggtttcttgagaaagtgagggatgcacagttgggtttta

SEQ ID NO: 65177 - DNA, 40 bp, Homo sapiens
taaaacccaactgtgcatccctcactttctcaagaaacct

SEQ ID NO: 65178 - DNA, 40 bp, Homo sapiens
ggtttcttgagaaagtgagggatgcacagttgggttttag

SEQ ID NO: 65179 - DNA, 40 bp, Homo sapiens
ctaaaacccaactgtgcatccctcactttctcaagaaacc

SEQ ID NO: 65180 - DNA, 40 bp, Homo sapiens
gtttcttgagaaagtgagggatgcacagttgggttttaga

SEQ ID NO: 65181 - DNA, 40 bp, Homo sapiens
tctaaaacccaactgtgcatccctcactttctcaagaaac

SEQ ID NO: 65182 - DNA, 40 bp, Homo sapiens
tttcttgagaaagtgagggatgcacagttgggttttagaa

SEQ ID NO: 65183 - DNA, 40 bp, Homo sapiens
ttctaaaacccaactgtgcatccctcactttctcaagaaa

SEQ ID NO: 65184 - DNA, 40 bp, Homo sapiens
ttcttgagaaagtgagggatgcacagttgggttttagaat

SEQ ID NO: 65185 - DNA, 40 bp, Homo sapiens
attctaaaacccaactgtgcatccctcactttctcaagaa

SEQ ID NO: 65186 - DNA, 40 bp, Homo sapiens
tcttgagaaagtgagggatgcacagttgggttttagaata

SEQ ID NO: 65187 - DNA, 40 bp, Homo sapiens
tattctaaaacccaactgtgcatccctcactttctcaaga

SEQ ID NO: 65188 - DNA, 40 bp, Homo sapiens
cttgagaaagtgagggatgcacagttgggttttagaatac

SEQ ID NO: 65189 - DNA, 40 bp, Homo sapiens
gtattctaaaacccaactgtgcatccctcactttctcaag

SEQ ID NO: 65190 - DNA, 40 bp, Homo sapiens
ttgagaaagtgagggatgcacagttgggttttagaataca

SEQ ID NO: 65191 - DNA, 40 bp, Homo sapiens
tgtattctaaaacccaactgtgcatccctcactttctcaa

SEQ ID NO: 65192 - DNA, 40 bp, Homo sapiens
tgagaaagtgagggatgcacagttgggttttagaatacat

SEQ ID NO: 65193 - DNA, 40 bp, Homo sapiens
atgtattctaaaacccaactgtgcatccctcactttctca

SEQ ID NO: 65194 - DNA, 40 bp, Homo sapiens
gagaaagtgagggatgcacagttgggttttagaatacatc

SEQ ID NO: 65195 - DNA, 40 bp, Homo sapiens
gatgtattctaaaacccaactgtgcatccctcactttctc

SEQ ID NO: 65196 - DNA, 40 bp, Homo sapiens
agaaagtgagggatgcacagttgggttttagaatacatct

SEQ ID NO: 65197 - DNA, 40 bp, Homo sapiens
agatgtattctaaaacccaactgtgcatccctcactttct

SEQ ID NO: 65198 - DNA, 40 bp, Homo sapiens
gaaagtgagggatgcacagttgggttttagaatacatctt

SEQ ID NO: 65199 - DNA, 40 bp, Homo sapiens
aagatgtattctaaaacccaactgtgcatccctcactttc

SEQ ID NO: 65200 - DNA, 40 bp, Homo sapiens
aaagtgagggatgcacagttgggttttagaatacatcttg

SEQ ID NO: 65201 - DNA, 40 bp, Homo sapiens
caagatgtattctaaaacccaactgtgcatccctcacttt

SEQ ID NO: 65202 - DNA, 40 bp, Homo sapiens
aagtgagggatgcacagttgggttttagaatacatcttgt

SEQ ID NO: 65203 - DNA, 40 bp, Homo sapiens
acaagatgtattctaaaacccaactgtgcatccctcactt

SEQ ID NO: 65204 - DNA, 40 bp, Homo sapiens
agtgagggatgcacagttgggttttagaatacatcttgtt

SEQ ID NO: 65205 - DNA, 40 bp, Homo sapiens
aacaagatgtattctaaaacccaactgtgcatccctcact

SEQ ID NO: 65206 - DNA, 40 bp, Homo sapiens
gtgagggatgcacagttgggttttagaatacatcttgttc

SEQ ID NO: 65207 - DNA, 40 bp, Homo sapiens
gaacaagatgtattctaaaacccaactgtgcatccctcac

SEQ ID NO: 65208 - DNA, 40 bp, Homo sapiens
tgagggatgcacagttgggttttagaatacatcttgttcc

SEQ ID NO: 65209 - DNA, 40 bp, Homo sapiens
ggaacaagatgtattctaaaacccaactgtgcatccctca

SEQ ID NO: 65210 - DNA, 40 bp, Homo sapiens
gagggatgcacagttgggttttagaatacatcttgttcct

SEQ ID NO: 65211 - DNA, 40 bp, Homo sapiens
aggaacaagatgtattctaaaacccaactgtgcatccctc

SEQ ID NO: 65212 - DNA, 40 bp, Homo sapiens
agggatgcacagttgggttttagaatacatcttgttcctc

SEQ ID NO: 65213 - DNA, 40 bp, Homo sapiens
gaggaacaagatgtattctaaaacccaactgtgcatccct

SEQ ID NO: 65214 - DNA, 40 bp, Homo sapiens
gggatgcacagttgggttttagaatacatcttgttcctcc

SEQ ID NO: 65215 - DNA, 40 bp, Homo sapiens
ggaggaacaagatgtattctaaaacccaactgtgcatccc

SEQ ID NO: 65216 - DNA, 40 bp, Homo sapiens
ggatgcacagttgggttttagaatacatcttgttcctcca

SEQ ID NO: 65217 - DNA, 40 bp, Homo sapiens
tggaggaacaagatgtattctaaaacccaactgtgcatcc

SEQ ID NO: 65218 - DNA, 40 bp, Homo sapiens
gatgcacagttgggttttagaatacatcttgttcctccat

SEQ ID NO: 65219 - DNA, 40 bp, Homo sapiens
atggaggaacaagatgtattctaaaacccaactgtgcatc

SEQ ID NO: 65220 - DNA, 40 bp, Homo sapiens
atgcacagttgggttttagaatacatcttgttcctccatg

SEQ ID NO: 65221 - DNA, 40 bp, Homo sapiens
catggaggaacaagatgtattctaaaacccaactgtgcat

SEQ ID NO: 65222 - DNA, 40 bp, Homo sapiens
tgcacagttgggttttagaatacatcttgttcctccatgc

SEQ ID NO: 65223 - DNA, 40 bp, Homo sapiens
gcatggaggaacaagatgtattctaaaacccaactgtgca

SEQ ID NO: 65224 - DNA, 40 bp, Homo sapiens
gcacagttgggttttagaatacatcttgttcctccatgcc

SEQ ID NO: 65225 - DNA, 40 bp, Homo sapiens
ggcatggaggaacaagatgtattctaaaacccaactgtgc

SEQ ID NO: 65226 - DNA, 40 bp, Homo sapiens
cacagttgggttttagaatacatcttgttcctccatgccc

SEQ ID NO: 65227 - DNA, 40 bp, Homo sapiens
gggcatggaggaacaagatgtattctaaaacccaactgtg

SEQ ID NO: 65228 - DNA, 40 bp, Homo sapiens
acagttgggttttagaatacatcttgttcctccatgccct

SEQ ID NO: 65229 - DNA, 40 bp, Homo sapiens
agggcatggaggaacaagatgtattctaaaacccaactgt

SEQ ID NO: 65230 - DNA, 40 bp, Homo sapiens
cagttgggttttagaatacatcttgttcctccatgccctt

SEQ ID NO: 65231 - DNA, 40 bp, Homo sapiens
aagggcatggaggaacaagatgtattctaaaacccaactg

SEQ ID NO: 65232 - DNA, 40 bp, Homo sapiens
agttgggttttagaatacatcttgttcctccatgcccttc

SEQ ID NO: 65233 - DNA, 40 bp, Homo sapiens
gaagggcatggaggaacaagatgtattctaaaacccaact

SEQ ID NO: 65234 - DNA, 40 bp, Homo sapiens
gttgggttttagaatacatcttgttcctccatgcccttcc

SEQ ID NO: 65235 - DNA, 40 bp, Homo sapiens
ggaagggcatggaggaacaagatgtattctaaaacccaac

SEQ ID NO: 65236 - DNA, 40 bp, Homo sapiens
ttgggttttagaatacatcttgttcctccatgcccttccc

SEQ ID NO: 65237 - DNA, 40 bp, Homo sapiens
gggaagggcatggaggaacaagatgtattctaaaacccaa

SEQ ID NO: 65238 - DNA, 40 bp, Homo sapiens
tgggttttagaatacatcttgttcctccatgcccttcccc

SEQ ID NO: 65239 - DNA, 40 bp, Homo sapiens
ggggaagggcatggaggaacaagatgtattctaaaaccca

SEQ ID NO: 65240 - DNA, 40 bp, Homo sapiens
gggttttagaatacatcttgttcctccatgcccttcccca

SEQ ID NO: 65241 - DNA, 40 bp, Homo sapiens
tggggaagggcatggaggaacaagatgtattctaaaaccc

SEQ ID NO: 65242 - DNA, 40 bp, Homo sapiens
ggttttagaatacatcttgttcctccatgcccttccccac

SEQ ID NO: 65243 - DNA, 40 bp, Homo sapiens
gtggggaagggcatggaggaacaagatgtattctaaaacc

SEQ ID NO: 65244 - DNA, 40 bp, Homo sapiens
gttttagaatacatcttgttcctccatgcccttccccacc

SEQ ID NO: 65245 - DNA, 40 bp, Homo sapiens
ggtggggaagggcatggaggaacaagatgtattctaaaac

SEQ ID NO: 65246 - DNA, 40 bp, Homo sapiens
ttttagaatacatcttgttcctccatgcccttccccacca

SEQ ID NO: 65247 - DNA, 40 bp, Homo sapiens
tggtggggaagggcatggaggaacaagatgtattctaaaa

SEQ ID NO: 65248 - DNA, 40 bp, Homo sapiens
tttagaatacatcttgttcctccatgcccttccccaccaa

SEQ ID NO: 65249 - DNA, 40 bp, Homo sapiens
ttggtggggaagggcatggaggaacaagatgtattctaaa

SEQ ID NO: 65250 - DNA, 40 bp, Homo sapiens
ttagaatacatcttgttcctccatgcccttccccaccaaa

SEQ ID NO: 65251 - DNA, 40 bp, Homo sapiens
tttggtggggaagggcatggaggaacaagatgtattctaa

SEQ ID NO: 65252 - DNA, 40 bp, Homo sapiens
tagaatacatcttgttcctccatgcccttccccaccaaaa

SEQ ID NO: 65253 - DNA, 40 bp, Homo sapiens
ttttggtggggaagggcatggaggaacaagatgtattcta

SEQ ID NO: 65254 - DNA, 40 bp, Homo sapiens
agaatacatcttgttcctccatgcccttccccaccaaaag

SEQ ID NO: 65255 - DNA, 40 bp, Homo sapiens
cttttggtggggaagggcatggaggaacaagatgtattct

SEQ ID NO: 65256 - DNA, 40 bp, Homo sapiens
gaatacatcttgttcctccatgcccttccccaccaaaagg

SEQ ID NO: 65257 - DNA, 40 bp, Homo sapiens
ccttttggtggggaagggcatggaggaacaagatgtattc

SEQ ID NO: 65258 - DNA, 40 bp, Homo sapiens
aatacatcttgttcctccatgcccttccccaccaaaaggc

SEQ ID NO: 65259 - DNA, 40 bp, Homo sapiens
gccttttggtggggaagggcatggaggaacaagatgtatt

SEQ ID NO: 65260 - DNA, 40 bp, Homo sapiens
atacatcttgttcctccatgcccttccccaccaaaaggct

SEQ ID NO: 65261 - DNA, 40 bp, Homo sapiens
agccttttggtggggaagggcatggaggaacaagatgtat

SEQ ID NO: 65262 - DNA, 40 bp, Homo sapiens
tacatcttgttcctccatgcccttccccaccaaaaggctg

SEQ ID NO: 65263 - DNA, 40 bp, Homo sapiens
cagccttttggtggggaagggcatggaggaacaagatgta

SEQ ID NO: 65264 - DNA, 40 bp, Homo sapiens
acatcttgttcctccatgcccttccccaccaaaaggctgg

SEQ ID NO: 65265 - DNA, 40 bp, Homo sapiens
ccagccttttggtggggaagggcatggaggaacaagatgt

SEQ ID NO: 65266 - DNA, 40 bp, Homo sapiens
catcttgttcctccatgcccttccccaccaaaaggctggt

SEQ ID NO: 65267 - DNA, 40 bp, Homo sapiens
accagccttttggtggggaagggcatggaggaacaagatg

SEQ ID NO: 65268 - DNA, 40 bp, Homo sapiens
atcttgttcctccatgcccttccccaccaaaaggctggta

SEQ ID NO: 65269 - DNA, 40 bp, Homo sapiens
taccagccttttggtggggaagggcatggaggaacaagat

SEQ ID NO: 65270 - DNA, 40 bp, Homo sapiens
tcttgttcctccatgcccttccccaccaaaaggctggtag

SEQ ID NO: 65271 - DNA, 40 bp, Homo sapiens
ctaccagccttttggtggggaagggcatggaggaacaaga

SEQ ID NO: 65272 - DNA, 40 bp, Homo sapiens
cttgttcctccatgcccttccccaccaaaaggctggtagt

SEQ ID NO: 65273 - DNA, 40 bp, Homo sapiens
actaccagccttttggtggggaagggcatggaggaacaag

SEQ ID NO: 65274 - DNA, 40 bp, Homo sapiens
ttgttcctccatgcccttccccaccaaaaggctggtagtc

SEQ ID NO: 65275 - DNA, 40 bp, Homo sapiens
gactaccagccttttggtggggaagggcatggaggaacaa

SEQ ID NO: 65276 - DNA, 40 bp, Homo sapiens
tgttcctccatgcccttccccaccaaaaggctggtagtct

SEQ ID NO: 65277 - DNA, 40 bp, Homo sapiens
agactaccagccttttggtggggaagggcatggaggaaca

SEQ ID NO: 65278 - DNA, 40 bp, Homo sapiens
gttcctccatgcccttccccaccaaaaggctggtagtctt

SEQ ID NO: 65279 - DNA, 40 bp, Homo sapiens
aagactaccagccttttggtggggaagggcatggaggaac

SEQ ID NO: 65280 - DNA, 40 bp, Homo sapiens
ttcctccatgcccttccccaccaaaaggctggtagtcttg

SEQ ID NO: 65281 - DNA, 40 bp, Homo sapiens
caagactaccagccttttggtggggaagggcatggaggaa

SEQ ID NO: 65282 - DNA, 40 bp, Homo sapiens
tcctccatgcccttccccaccaaaaggctggtagtcttgc

SEQ ID NO: 65283 - DNA, 40 bp, Homo sapiens
gcaagactaccagccttttggtggggaagggcatggagga

SEQ ID NO: 65284 - DNA, 40 bp, Homo sapiens
cctccatgcccttccccaccaaaaggctggtagtcttgca

SEQ ID NO: 65285 - DNA, 40 bp, Homo sapiens
tgcaagactaccagccttttggtggggaagggcatggagg

SEQ ID NO: 65286 - DNA, 40 bp, Homo sapiens
ctccatgcccttccccaccaaaaggctggtagtcttgcat

SEQ ID NO: 65287 - DNA, 40 bp, Homo sapiens
atgcaagactaccagccttttggtggggaagggcatggag

SEQ ID NO: 65288 - DNA, 40 bp, Homo sapiens
tccatgcccttccccaccaaaaggctggtagtcttgcatt

SEQ ID NO: 65289 - DNA, 40 bp, Homo sapiens
aatgcaagactaccagccttttggtggggaagggcatgga

SEQ ID NO: 65290 - DNA, 40 bp, Homo sapiens
ccatgcccttccccaccaaaaggctggtagtcttgcattt

SEQ ID NO: 65291 - DNA, 40 bp, Homo sapiens
aaatgcaagactaccagccttttggtggggaagggcatgg

SEQ ID NO: 65292 - DNA, 40 bp, Homo sapiens
catgcccttccccaccaaaaggctggtagtcttgcatttg

SEQ ID NO: 65293 - DNA, 40 bp, Homo sapiens
caaatgcaagactaccagccttttggtggggaagggcatg

SEQ ID NO: 65294 - DNA, 40 bp, Homo sapiens
atgcccttccccaccaaaaggctggtagtcttgcatttgt

SEQ ID NO: 65295 - DNA, 40 bp, Homo sapiens
acaaatgcaagactaccagccttttggtggggaagggcat

SEQ ID NO: 65296 - DNA, 40 bp, Homo sapiens
tgcccttccccaccaaaaggctggtagtcttgcatttgta

SEQ ID NO: 65297 - DNA, 40 bp, Homo sapiens
tacaaatgcaagactaccagccttttggtggggaagggca

SEQ ID NO: 65298 - DNA, 40 bp, Homo sapiens
gcccttccccaccaaaaggctggtagtcttgcatttgtat

SEQ ID NO: 65299 - DNA, 40 bp, Homo sapiens
atacaaatgcaagactaccagccttttggtggggaagggc

SEQ ID NO: 65300 - DNA, 40 bp, Homo sapiens
cccttccccaccaaaaggctggtagtcttgcatttgtata

SEQ ID NO: 65301 - DNA, 40 bp, Homo sapiens
tatacaaatgcaagactaccagccttttggtggggaaggg

SEQ ID NO: 65302 - DNA, 40 bp, Homo sapiens
ccttccccaccaaaaggctggtagtcttgcatttgtatat

SEQ ID NO: 65303 - DNA, 40 bp, Homo sapiens
atatacaaatgcaagactaccagccttttggtggggaagg

SEQ ID NO: 65304 - DNA, 40 bp, Homo sapiens
cttccccaccaaaaggctggtagtcttgcatttgtatata

SEQ ID NO: 65305 - DNA, 40 bp, Homo sapiens
tatatacaaatgcaagactaccagccttttggtggggaag

SEQ ID NO: 65306 - DNA, 40 bp, Homo sapiens
ttccccaccaaaaggctggtagtcttgcatttgtatatag

SEQ ID NO: 65307 - DNA, 40 bp, Homo sapiens
ctatatacaaatgcaagactaccagccttttggtggggaa

SEQ ID NO: 65308 - DNA, 40 bp, Homo sapiens
tccccaccaaaaggctggtagtcttgcatttgtatatagt

SEQ ID NO: 65309 - DNA, 40 bp, Homo sapiens
actatatacaaatgcaagactaccagccttttggtgggga

SEQ ID NO: 65310 - DNA, 40 bp, Homo sapiens
ccccaccaaaaggctggtagtcttgcatttgtatatagtt

SEQ ID NO: 65311 - DNA, 40 bp, Homo sapiens
aactatatacaaatgcaagactaccagccttttggtgggg

SEQ ID NO: 65312 - DNA, 40 bp, Homo sapiens
cccaccaaaaggctggtagtcttgcatttgtatatagtta

SEQ ID NO: 65313 - DNA, 40 bp, Homo sapiens
taactatatacaaatgcaagactaccagccttttggtggg

SEQ ID NO: 65314 - DNA, 40 bp, Homo sapiens
ccaccaaaaggctggtagtcttgcatttgtatatagttag

SEQ ID NO: 65315 - DNA, 40 bp, Homo sapiens
ctaactatatacaaatgcaagactaccagccttttggtgg

SEQ ID NO: 65316 - DNA, 40 bp, Homo sapiens
caccaaaaggctggtagtcttgcatttgtatatagttagg

SEQ ID NO: 65317 - DNA, 40 bp, Homo sapiens
cctaactatatacaaatgcaagactaccagccttttggtg

SEQ ID NO: 65318 - DNA, 40 bp, Homo sapiens
accaaaaggctggtagtcttgcatttgtatatagttaggg

SEQ ID NO: 65319 - DNA, 40 bp, Homo sapiens
ccctaactatatacaaatgcaagactaccagccttttggt

SEQ ID NO: 65320 - DNA, 40 bp, Homo sapiens
ccaaaaggctggtagtcttgcatttgtatatagttagggt

SEQ ID NO: 65321 - DNA, 40 bp, Homo sapiens
accctaactatatacaaatgcaagactaccagccttttgg

SEQ ID NO: 65322 - DNA, 40 bp, Homo sapiens
caaaaggctggtagtcttgcatttgtatatagttagggta

SEQ ID NO: 65323 - DNA, 40 bp, Homo sapiens
taccctaactatatacaaatgcaagactaccagccttttg

SEQ ID NO: 65324 - DNA, 40 bp, Homo sapiens
aaaaggctggtagtcttgcatttgtatatagttagggtat

SEQ ID NO: 65325 - DNA, 40 bp, Homo sapiens
ataccctaactatatacaaatgcaagactaccagcctttt

SEQ ID NO: 65326 - DNA, 40 bp, Homo sapiens
aaaggctggtagtcttgcatttgtatatagttagggtatt

SEQ ID NO: 65327 - DNA, 40 bp, Homo sapiens
aataccctaactatatacaaatgcaagactaccagccttt

SEQ ID NO: 65328 - DNA, 40 bp, Homo sapiens
aaggctggtagtcttgcatttgtatatagttagggtattt

SEQ ID NO: 65329 - DNA, 40 bp, Homo sapiens
aaataccctaactatatacaaatgcaagactaccagcctt

SEQ ID NO: 65330 - DNA, 40 bp, Homo sapiens
aggctggtagtcttgcatttgtatatagttagggtatttg

SEQ ID NO: 65331 - DNA, 40 bp, Homo sapiens
caaataccctaactatatacaaatgcaagactaccagcct

SEQ ID NO: 65332 - DNA, 40 bp, Homo sapiens
ggctggtagtcttgcatttgtatatagttagggtatttga

SEQ ID NO: 65333 - DNA, 40 bp, Homo sapiens
tcaaataccctaactatatacaaatgcaagactaccagcc

SEQ ID NO: 65334 - DNA, 40 bp, Homo sapiens
gctggtagtcttgcatttgtatatagttagggtatttgat

SEQ ID NO: 65335 - DNA, 40 bp, Homo sapiens
atcaaataccctaactatatacaaatgcaagactaccagc

SEQ ID NO: 65336 - DNA, 40 bp, Homo sapiens
ctggtagtcttgcatttgtatatagttagggtatttgatg

SEQ ID NO: 65337 - DNA, 40 bp, Homo sapiens
catcaaataccctaactatatacaaatgcaagactaccag

SEQ ID NO: 65338 - DNA, 40 bp, Homo sapiens
tggtagtcttgcatttgtatatagttagggtatttgatgt

SEQ ID NO: 65339 - DNA, 40 bp, Homo sapiens
acatcaaataccctaactatatacaaatgcaagactacca

SEQ ID NO: 65340 - DNA, 40 bp, Homo sapiens
ggtagtcttgcatttgtatatagttagggtatttgatgtg

SEQ ID NO: 65341 - DNA, 40 bp, Homo sapiens
cacatcaaataccctaactatatacaaatgcaagactacc

SEQ ID NO: 65342 - DNA, 40 bp, Homo sapiens
gtagtcttgcatttgtatatagttagggtatttgatgtgt

SEQ ID NO: 65343 - DNA, 40 bp, Homo sapiens
acacatcaaataccctaactatatacaaatgcaagactac

SEQ ID NO: 65344 - DNA, 40 bp, Homo sapiens
tagtcttgcatttgtatatagttagggtatttgatgtgtt

SEQ ID NO: 65345 - DNA, 40 bp, Homo sapiens
aacacatcaaataccctaactatatacaaatgcaagacta

SEQ ID NO: 65346 - DNA, 40 bp, Homo sapiens
agtcttgcatttgtatatagttagggtatttgatgtgttg

SEQ ID NO: 65347 - DNA, 40 bp, Homo sapiens
caacacatcaaataccctaactatatacaaatgcaagact

SEQ ID NO: 65348 - DNA, 40 bp, Homo sapiens
gtcttgcatttgtatatagttagggtatttgatgtgttgc

SEQ ID NO: 65349 - DNA, 40 bp, Homo sapiens
gcaacacatcaaataccctaactatatacaaatgcaagac

SEQ ID NO: 65350 - DNA, 40 bp, Homo sapiens
tcttgcatttgtatatagttagggtatttgatgtgttgct

SEQ ID NO: 65351 - DNA, 40 bp, Homo sapiens
agcaacacatcaaataccctaactatatacaaatgcaaga

SEQ ID NO: 65352 - DNA, 40 bp, Homo sapiens
cttgcatttgtatatagttagggtatttgatgtgttgctt

SEQ ID NO: 65353 - DNA, 40 bp, Homo sapiens
aagcaacacatcaaataccctaactatatacaaatgcaag

SEQ ID NO: 65354 - DNA, 40 bp, Homo sapiens
ttgcatttgtatatagttagggtatttgatgtgttgcttc

SEQ ID NO: 65355 - DNA, 40 bp, Homo sapiens
gaagcaacacatcaaataccctaactatatacaaatgcaa

SEQ ID NO: 65356 - DNA, 40 bp, Homo sapiens
tgcatttgtatatagttagggtatttgatgtgttgcttcc

SEQ ID NO: 65357 - DNA, 40 bp, Homo sapiens
ggaagcaacacatcaaataccctaactatatacaaatgca

SEQ ID NO: 65358 - DNA, 40 bp, Homo sapiens
gcatttgtatatagttagggtatttgatgtgttgcttcct

SEQ ID NO: 65359 - DNA, 40 bp, Homo sapiens
aggaagcaacacatcaaataccctaactatatacaaatgc

SEQ ID NO: 65360 - DNA, 40 bp, Homo sapiens
catttgtatatagttagggtatttgatgtgttgcttcctt

SEQ ID NO: 65361 - DNA, 40 bp, Homo sapiens
aaggaagcaacacatcaaataccctaactatatacaaatg

SEQ ID NO: 65362 - DNA, 40 bp, Homo sapiens
atttgtatatagttagggtatttgatgtgttgcttccttg

SEQ ID NO: 65363 - DNA, 40 bp, Homo sapiens
caaggaagcaacacatcaaataccctaactatatacaaat

SEQ ID NO: 65364 - DNA, 40 bp, Homo sapiens
tttgtatatagttagggtatttgatgtgttgcttccttga

SEQ ID NO: 65365 - DNA, 40 bp, Homo sapiens
tcaaggaagcaacacatcaaataccctaactatatacaaa

SEQ ID NO: 65366 - DNA, 40 bp, Homo sapiens
ttgtatatagttagggtatttgatgtgttgcttccttgac

SEQ ID NO: 65367 - DNA, 40 bp, Homo sapiens
gtcaaggaagcaacacatcaaataccctaactatatacaa

SEQ ID NO: 65368 - DNA, 40 bp, Homo sapiens
tgtatatagttagggtatttgatgtgttgcttccttgaca

SEQ ID NO: 65369 - DNA, 40 bp, Homo sapiens
tgtcaaggaagcaacacatcaaataccctaactatataca

SEQ ID NO: 65370 - DNA, 40 bp, Homo sapiens
gtatatagttagggtatttgatgtgttgcttccttgacag

SEQ ID NO: 65371 - DNA, 40 bp, Homo sapiens
ctgtcaaggaagcaacacatcaaataccctaactatatac

SEQ ID NO: 65372 - DNA, 40 bp, Homo sapiens
tatatagttagggtatttgatgtgttgcttccttgacaga

SEQ ID NO: 65373 - DNA, 40 bp, Homo sapiens
tctgtcaaggaagcaacacatcaaataccctaactatata

SEQ ID NO: 65374 - DNA, 40 bp, Homo sapiens
atatagttagggtatttgatgtgttgcttccttgacagag

SEQ ID NO: 65375 - DNA, 40 bp, Homo sapiens
ctctgtcaaggaagcaacacatcaaataccctaactatat

SEQ ID NO: 65376 - DNA, 40 bp, Homo sapiens
tatagttagggtatttgatgtgttgcttccttgacagagt

SEQ ID NO: 65377 - DNA, 40 bp, Homo sapiens
actctgtcaaggaagcaacacatcaaataccctaactata

SEQ ID NO: 65378 - DNA, 40 bp, Homo sapiens
atagttagggtatttgatgtgttgcttccttgacagagtt

SEQ ID NO: 65379 - DNA, 40 bp, Homo sapiens
aactctgtcaaggaagcaacacatcaaataccctaactat

SEQ ID NO: 65380 - DNA, 40 bp, Homo sapiens
tagttagggtatttgatgtgttgcttccttgacagagttt

SEQ ID NO: 65381 - DNA, 40 bp, Homo sapiens
aaactctgtcaaggaagcaacacatcaaataccctaacta

SEQ ID NO: 65382 - DNA, 40 bp, Homo sapiens
agttagggtatttgatgtgttgcttccttgacagagtttt

SEQ ID NO: 65383 - DNA, 40 bp, Homo sapiens
aaaactctgtcaaggaagcaacacatcaaataccctaact

SEQ ID NO: 65384 - DNA, 40 bp, Homo sapiens
gttagggtatttgatgtgttgcttccttgacagagttttg

SEQ ID NO: 65385 - DNA, 40 bp, Homo sapiens
caaaactctgtcaaggaagcaacacatcaaataccctaac

SEQ ID NO: 65386 - DNA, 40 bp, Homo sapiens
ttagggtatttgatgtgttgcttccttgacagagttttgc

SEQ ID NO: 65387 - DNA, 40 bp, Homo sapiens
gcaaaactctgtcaaggaagcaacacatcaaataccctaa

SEQ ID NO: 65388 - DNA, 40 bp, Homo sapiens
tagggtatttgatgtgttgcttccttgacagagttttgca

SEQ ID NO: 65389 - DNA, 40 bp, Homo sapiens
tgcaaaactctgtcaaggaagcaacacatcaaatacccta

SEQ ID NO: 65390 - DNA, 40 bp, Homo sapiens
agggtatttgatgtgttgcttccttgacagagttttgcaa

SEQ ID NO: 65391 - DNA, 40 bp, Homo sapiens
ttgcaaaactctgtcaaggaagcaacacatcaaataccct

SEQ ID NO: 65392 - DNA, 40 bp, Homo sapiens
gggtatttgatgtgttgcttccttgacagagttttgcaag

SEQ ID NO: 65393 - DNA, 40 bp, Homo sapiens
cttgcaaaactctgtcaaggaagcaacacatcaaataccc

SEQ ID NO: 65394 - DNA, 40 bp, Homo sapiens
ggtatttgatgtgttgcttccttgacagagttttgcaaga

SEQ ID NO: 65395 - DNA, 40 bp, Homo sapiens
tcttgcaaaactctgtcaaggaagcaacacatcaaatacc

SEQ ID NO: 65396 - DNA, 40 bp, Homo sapiens
gtatttgatgtgttgcttccttgacagagttttgcaagaa

SEQ ID NO: 65397 - DNA, 40 bp, Homo sapiens
ttcttgcaaaactctgtcaaggaagcaacacatcaaatac

SEQ ID NO: 65398 - DNA, 40 bp, Homo sapiens
tatttgatgtgttgcttccttgacagagttttgcaagaat

SEQ ID NO: 65399 - DNA, 40 bp, Homo sapiens
attcttgcaaaactctgtcaaggaagcaacacatcaaata

SEQ ID NO: 65400 - DNA, 40 bp, Homo sapiens
atttgatgtgttgcttccttgacagagttttgcaagaatt

SEQ ID NO: 65401 - DNA, 40 bp, Homo sapiens
aattcttgcaaaactctgtcaaggaagcaacacatcaaat

SEQ ID NO: 65402 - DNA, 40 bp, Homo sapiens
tttgatgtgttgcttccttgacagagttttgcaagaattt

SEQ ID NO: 65403 - DNA, 40 bp, Homo sapiens
aaattcttgcaaaactctgtcaaggaagcaacacatcaaa

SEQ ID NO: 65404 - DNA, 40 bp, Homo sapiens
ttgatgtgttgcttccttgacagagttttgcaagaatttg

SEQ ID NO: 65405 - DNA, 40 bp, Homo sapiens
caaattcttgcaaaactctgtcaaggaagcaacacatcaa

SEQ ID NO: 65406 - DNA, 40 bp, Homo sapiens
tgatgtgttgcttccttgacagagttttgcaagaatttgc

SEQ ID NO: 65407 - DNA, 40 bp, Homo sapiens
gcaaattcttgcaaaactctgtcaaggaagcaacacatca

SEQ ID NO: 65408 - DNA, 40 bp, Homo sapiens
gatgtgttgcttccttgacagagttttgcaagaatttgca

SEQ ID NO: 65409 - DNA, 40 bp, Homo sapiens
tgcaaattcttgcaaaactctgtcaaggaagcaacacatc

SEQ ID NO: 65410 - DNA, 40 bp, Homo sapiens
atgtgttgcttccttgacagagttttgcaagaatttgcag

SEQ ID NO: 65411 - DNA, 40 bp, Homo sapiens
ctgcaaattcttgcaaaactctgtcaaggaagcaacacat

SEQ ID NO: 65412 - DNA, 40 bp, Homo sapiens
tgtgttgcttccttgacagagttttgcaagaatttgcaga

SEQ ID NO: 65413 - DNA, 40 bp, Homo sapiens
tctgcaaattcttgcaaaactctgtcaaggaagcaacaca

SEQ ID NO: 65414 - DNA, 40 bp, Homo sapiens
gtgttgcttccttgacagagttttgcaagaatttgcagat

SEQ ID NO: 65415 - DNA, 40 bp, Homo sapiens
atctgcaaattcttgcaaaactctgtcaaggaagcaacac

SEQ ID NO: 65416 - DNA, 40 bp, Homo sapiens
tgttgcttccttgacagagttttgcaagaatttgcagatt

SEQ ID NO: 65417 - DNA, 40 bp, Homo sapiens
aatctgcaaattcttgcaaaactctgtcaaggaagcaaca

SEQ ID NO: 65418 - DNA, 40 bp, Homo sapiens
gttgcttccttgacagagttttgcaagaatttgcagattt

SEQ ID NO: 65419 - DNA, 40 bp, Homo sapiens
aaatctgcaaattcttgcaaaactctgtcaaggaagcaac

SEQ ID NO: 65420 - DNA, 40 bp, Homo sapiens
ttgcttccttgacagagttttgcaagaatttgcagattta

SEQ ID NO: 65421 - DNA, 40 bp, Homo sapiens
taaatctgcaaattcttgcaaaactctgtcaaggaagcaa

SEQ ID NO: 65422 - DNA, 40 bp, Homo sapiens
tgcttccttgacagagttttgcaagaatttgcagatttaa

SEQ ID NO: 65423 - DNA, 40 bp, Homo sapiens
ttaaatctgcaaattcttgcaaaactctgtcaaggaagca

SEQ ID NO: 65424 - DNA, 40 bp, Homo sapiens
gcttccttgacagagttttgcaagaatttgcagatttaac

SEQ ID NO: 65425 - DNA, 40 bp, Homo sapiens
gttaaatctgcaaattcttgcaaaactctgtcaaggaagc

SEQ ID NO: 65426 - DNA, 40 bp, Homo sapiens
cttccttgacagagttttgcaagaatttgcagatttaaca

SEQ ID NO: 65427 - DNA, 40 bp, Homo sapiens
tgttaaatctgcaaattcttgcaaaactctgtcaaggaag

SEQ ID NO: 65428 - DNA, 40 bp, Homo sapiens
ttccttgacagagttttgcaagaatttgcagatttaacag

SEQ ID NO: 65429 - DNA, 40 bp, Homo sapiens
ctgttaaatctgcaaattcttgcaaaactctgtcaaggaa

SEQ ID NO: 65430 - DNA, 40 bp, Homo sapiens
tccttgacagagttttgcaagaatttgcagatttaacagg

SEQ ID NO: 65431 - DNA, 40 bp, Homo sapiens
cctgttaaatctgcaaattcttgcaaaactctgtcaagga

SEQ ID NO: 65432 - DNA, 40 bp, Homo sapiens
ccttgacagagttttgcaagaatttgcagatttaacagga

SEQ ID NO: 65433 - DNA, 40 bp, Homo sapiens
tcctgttaaatctgcaaattcttgcaaaactctgtcaagg

SEQ ID NO: 65434 - DNA, 40 bp, Homo sapiens
cttgacagagttttgcaagaatttgcagatttaacaggaa

SEQ ID NO: 65435 - DNA, 40 bp, Homo sapiens
ttcctgttaaatctgcaaattcttgcaaaactctgtcaag

SEQ ID NO: 65436 - DNA, 40 bp, Homo sapiens
ttgacagagttttgcaagaatttgcagatttaacaggaac

SEQ ID NO: 65437 - DNA, 40 bp, Homo sapiens
gttcctgttaaatctgcaaattcttgcaaaactctgtcaa

SEQ ID NO: 65438 - DNA, 40 bp, Homo sapiens
tgacagagttttgcaagaatttgcagatttaacaggaaca

SEQ ID NO: 65439 - DNA, 40 bp, Homo sapiens
tgttcctgttaaatctgcaaattcttgcaaaactctgtca

SEQ ID NO: 65440 - DNA, 40 bp, Homo sapiens
gacagagttttgcaagaatttgcagatttaacaggaacaa

SEQ ID NO: 65441 - DNA, 40 bp, Homo sapiens
ttgttcctgttaaatctgcaaattcttgcaaaactctgtc

SEQ ID NO: 65442 - DNA, 40 bp, Homo sapiens
acagagttttgcaagaatttgcagatttaacaggaacaaa

SEQ ID NO: 65443 - DNA, 40 bp, Homo sapiens
tttgttcctgttaaatctgcaaattcttgcaaaactctgt

SEQ ID NO: 65444 - DNA, 40 bp, Homo sapiens
cagagttttgcaagaatttgcagatttaacaggaacaaaa

SEQ ID NO: 65445 - DNA, 40 bp, Homo sapiens
ttttgttcctgttaaatctgcaaattcttgcaaaactctg

SEQ ID NO: 65446 - DNA, 40 bp, Homo sapiens
agagttttgcaagaatttgcagatttaacaggaacaaaaa

SEQ ID NO: 65447 - DNA, 40 bp, Homo sapiens
tttttgttcctgttaaatctgcaaattcttgcaaaactct

SEQ ID NO: 65448 - DNA, 40 bp, Homo sapiens
gagttttgcaagaatttgcagatttaacaggaacaaaaac

SEQ ID NO: 65449 - DNA, 40 bp, Homo sapiens
gtttttgttcctgttaaatctgcaaattcttgcaaaactc

SEQ ID NO: 65450 - DNA, 40 bp, Homo sapiens
agttttgcaagaatttgcagatttaacaggaacaaaaact

SEQ ID NO: 65451 - DNA, 40 bp, Homo sapiens
agtttttgttcctgttaaatctgcaaattcttgcaaaact

SEQ ID NO: 65452 - DNA, 40 bp, Homo sapiens
gttttgcaagaatttgcagatttaacaggaacaaaaactt

SEQ ID NO: 65453 - DNA, 40 bp, Homo sapiens
aagtttttgttcctgttaaatctgcaaattcttgcaaaac

SEQ ID NO: 65454 - DNA, 40 bp, Homo sapiens
ttttgcaagaatttgcagatttaacaggaacaaaaactta

SEQ ID NO: 65455 - DNA, 40 bp, Homo sapiens
taagtttttgttcctgttaaatctgcaaattcttgcaaaa

SEQ ID NO: 65456 - DNA, 40 bp, Homo sapiens
tttgcaagaatttgcagatttaacaggaacaaaaacttac

SEQ ID NO: 65457 - DNA, 40 bp, Homo sapiens
gtaagtttttgttcctgttaaatctgcaaattcttgcaaa

SEQ ID NO: 65458 - DNA, 40 bp, Homo sapiens
ttgcaagaatttgcagatttaacaggaacaaaaacttact

SEQ ID NO: 65459 - DNA, 40 bp, Homo sapiens
agtaagtttttgttcctgttaaatctgcaaattcttgcaa

SEQ ID NO: 65460 - DNA, 40 bp, Homo sapiens
tgcaagaatttgcagatttaacaggaacaaaaacttactt

SEQ ID NO: 65461 - DNA, 40 bp, Homo sapiens
aagtaagtttttgttcctgttaaatctgcaaattcttgca

SEQ ID NO: 65462 - DNA, 40 bp, Homo sapiens
gcaagaatttgcagatttaacaggaacaaaaacttactta

SEQ ID NO: 65463 - DNA, 40 bp, Homo sapiens
taagtaagtttttgttcctgttaaatctgcaaattcttgc

SEQ ID NO: 65464 - DNA, 40 bp, Homo sapiens
caagaatttgcagatttaacaggaacaaaaacttacttaa

SEQ ID NO: 65465 - DNA, 40 bp, Homo sapiens
ttaagtaagtttttgttcctgttaaatctgcaaattcttg

SEQ ID NO: 65466 - DNA, 40 bp, Homo sapiens
aagaatttgcagatttaacaggaacaaaaacttacttaaa

SEQ ID NO: 65467 - DNA, 40 bp, Homo sapiens
tttaagtaagtttttgttcctgttaaatctgcaaattctt

SEQ ID NO: 65468 - DNA, 40 bp, Homo sapiens
agaatttgcagatttaacaggaacaaaaacttacttaaaa

SEQ ID NO: 65469 - DNA, 40 bp, Homo sapiens
ttttaagtaagtttttgttcctgttaaatctgcaaattct

SEQ ID NO: 65470 - DNA, 40 bp, Homo sapiens
gaatttgcagatttaacaggaacaaaaacttacttaaaac

SEQ ID NO: 65471 - DNA, 40 bp, Homo sapiens
gttttaagtaagtttttgttcctgttaaatctgcaaattc

SEQ ID NO: 65472 - DNA, 40 bp, Homo sapiens
aatttgcagatttaacaggaacaaaaacttacttaaaaca

SEQ ID NO: 65473 - DNA, 40 bp, Homo sapiens
tgttttaagtaagtttttgttcctgttaaatctgcaaatt

SEQ ID NO: 65474 - DNA, 40 bp, Homo sapiens
atttgcagatttaacaggaacaaaaacttacttaaaacaa

SEQ ID NO: 65475 - DNA, 40 bp, Homo sapiens
ttgttttaagtaagtttttgttcctgttaaatctgcaaat

SEQ ID NO: 65476 - DNA, 40 bp, Homo sapiens
tttgcagatttaacaggaacaaaaacttacttaaaacaaa

SEQ ID NO: 65477 - DNA, 40 bp, Homo sapiens
tttgttttaagtaagtttttgttcctgttaaatctgcaaa

SEQ ID NO: 65478 - DNA, 40 bp, Homo sapiens
ttgcagatttaacaggaacaaaaacttacttaaaacaaaa

SEQ ID NO: 65479 - DNA, 40 bp, Homo sapiens
ttttgttttaagtaagtttttgttcctgttaaatctgcaa

SEQ ID NO: 65480 - DNA, 40 bp, Homo sapiens
tgcagatttaacaggaacaaaaacttacttaaaacaaaat

SEQ ID NO: 65481 - DNA, 40 bp, Homo sapiens
attttgttttaagtaagtttttgttcctgttaaatctgca

SEQ ID NO: 65482 - DNA, 40 bp, Homo sapiens
gcagatttaacaggaacaaaaacttacttaaaacaaaatc

SEQ ID NO: 65483 - DNA, 40 bp, Homo sapiens
gattttgttttaagtaagtttttgttcctgttaaatctgc

SEQ ID NO: 65484 - DNA, 40 bp, Homo sapiens
cagatttaacaggaacaaaaacttacttaaaacaaaatct

SEQ ID NO: 65485 - DNA, 40 bp, Homo sapiens
agattttgttttaagtaagtttttgttcctgttaaatctg

SEQ ID NO: 65486 - DNA, 40 bp, Homo sapiens
agatttaacaggaacaaaaacttacttaaaacaaaatctc

SEQ ID NO: 65487 - DNA, 40 bp, Homo sapiens
gagattttgttttaagtaagtttttgttcctgttaaatct

SEQ ID NO: 65488 - DNA, 40 bp, Homo sapiens
gatttaacaggaacaaaaacttacttaaaacaaaatctct

SEQ ID NO: 65489 - DNA, 40 bp, Homo sapiens
agagattttgttttaagtaagtttttgttcctgttaaatc

SEQ ID NO: 65490 - DNA, 40 bp, Homo sapiens
atttaacaggaacaaaaacttacttaaaacaaaatctctt

SEQ ID NO: 65491 - DNA, 40 bp, Homo sapiens
aagagattttgttttaagtaagtttttgttcctgttaaat

SEQ ID NO: 65492 - DNA, 40 bp, Homo sapiens
tttaacaggaacaaaaacttacttaaaacaaaatctctta

SEQ ID NO: 65493 - DNA, 40 bp, Homo sapiens
taagagattttgttttaagtaagtttttgttcctgttaaa

SEQ ID NO: 65494 - DNA, 40 bp, Homo sapiens
ttaacaggaacaaaaacttacttaaaacaaaatctcttag

SEQ ID NO: 65495 - DNA, 40 bp, Homo sapiens
ctaagagattttgttttaagtaagtttttgttcctgttaa

SEQ ID NO: 65496 - DNA, 40 bp, Homo sapiens
taacaggaacaaaaacttacttaaaacaaaatctcttagt

SEQ ID NO: 65497 - DNA, 40 bp, Homo sapiens
actaagagattttgttttaagtaagtttttgttcctgtta

SEQ ID NO: 65498 - DNA, 40 bp, Homo sapiens
aacaggaacaaaaacttacttaaaacaaaatctcttagta

SEQ ID NO: 65499 - DNA, 40 bp, Homo sapiens
tactaagagattttgttttaagtaagtttttgttcctgtt

SEQ ID NO: 65500 - DNA, 40 bp, Homo sapiens
acaggaacaaaaacttacttaaaacaaaatctcttagtaa

SEQ ID NO: 65501 - DNA, 40 bp, Homo sapiens
ttactaagagattttgttttaagtaagtttttgttcctgt

SEQ ID NO: 65502 - DNA, 40 bp, Homo sapiens
caggaacaaaaacttacttaaaacaaaatctcttagtaaa

SEQ ID NO: 65503 - DNA, 40 bp, Homo sapiens
tttactaagagattttgttttaagtaagtttttgttcctg

SEQ ID NO: 65504 - DNA, 40 bp, Homo sapiens
aggaacaaaaacttacttaaaacaaaatctcttagtaaaa

SEQ ID NO: 65505 - DNA, 40 bp, Homo sapiens
ttttactaagagattttgttttaagtaagtttttgttcct

SEQ ID NO: 65506 - DNA, 40 bp, Homo sapiens
ggaacaaaaacttacttaaaacaaaatctcttagtaaaag

SEQ ID NO: 65507 - DNA, 40 bp, Homo sapiens
cttttactaagagattttgttttaagtaagtttttgttcc

SEQ ID NO: 65508 - DNA, 40 bp, Homo sapiens
gaacaaaaacttacttaaaacaaaatctcttagtaaaagc

SEQ ID NO: 65509 - DNA, 40 bp, Homo sapiens
gcttttactaagagattttgttttaagtaagtttttgttc

SEQ ID NO: 65510 - DNA, 40 bp, Homo sapiens
aacaaaaacttacttaaaacaaaatctcttagtaaaagca

SEQ ID NO: 65511 - DNA, 40 bp, Homo sapiens
tgcttttactaagagattttgttttaagtaagtttttgtt

SEQ ID NO: 65512 - DNA, 40 bp, Homo sapiens
acaaaaacttacttaaaacaaaatctcttagtaaaagcat

SEQ ID NO: 65513 - DNA, 40 bp, Homo sapiens
atgcttttactaagagattttgttttaagtaagtttttgt

SEQ ID NO: 65514 - DNA, 40 bp, Homo sapiens
caaaaacttacttaaaacaaaatctcttagtaaaagcata

SEQ ID NO: 65515 - DNA, 40 bp, Homo sapiens
tatgcttttactaagagattttgttttaagtaagtttttg

SEQ ID NO: 65516 - DNA, 40 bp, Homo sapiens
aaaaacttacttaaaacaaaatctcttagtaaaagcatag

SEQ ID NO: 65517 - DNA, 40 bp, Homo sapiens
ctatgcttttactaagagattttgttttaagtaagttttt

SEQ ID NO: 65518 - DNA, 40 bp, Homo sapiens
aaaacttacttaaaacaaaatctcttagtaaaagcatagt

SEQ ID NO: 65519 - DNA, 40 bp, Homo sapiens
actatgcttttactaagagattttgttttaagtaagtttt

SEQ ID NO: 65520 - DNA, 40 bp, Homo sapiens
aaacttacttaaaacaaaatctcttagtaaaagcatagtc

SEQ ID NO: 65521 - DNA, 40 bp, Homo sapiens
gactatgcttttactaagagattttgttttaagtaagttt

SEQ ID NO: 65522 - DNA, 40 bp, Homo sapiens
aacttacttaaaacaaaatctcttagtaaaagcatagtct

SEQ ID NO: 65523 - DNA, 40 bp, Homo sapiens
agactatgcttttactaagagattttgttttaagtaagtt

SEQ ID NO: 65524 - DNA, 40 bp, Homo sapiens
acttacttaaaacaaaatctcttagtaaaagcatagtcta

SEQ ID NO: 65525 - DNA, 40 bp, Homo sapiens
tagactatgcttttactaagagattttgttttaagtaagt

SEQ ID NO: 65526 - DNA, 40 bp, Homo sapiens
cttacttaaaacaaaatctcttagtaaaagcatagtctag

SEQ ID NO: 65527 - DNA, 40 bp, Homo sapiens
ctagactatgcttttactaagagattttgttttaagtaag

SEQ ID NO: 65528 - DNA, 40 bp, Homo sapiens
ttacttaaaacaaaatctcttagtaaaagcatagtctagc

SEQ ID NO: 65529 - DNA, 40 bp, Homo sapiens
gctagactatgcttttactaagagattttgttttaagtaa

SEQ ID NO: 65530 - DNA, 40 bp, Homo sapiens
tacttaaaacaaaatctcttagtaaaagcatagtctagca

SEQ ID NO: 65531 - DNA, 40 bp, Homo sapiens
tgctagactatgcttttactaagagattttgttttaagta

SEQ ID NO: 65532 - DNA, 40 bp, Homo sapiens
acttaaaacaaaatctcttagtaaaagcatagtctagcaa

SEQ ID NO: 65533 - DNA, 40 bp, Homo sapiens
ttgctagactatgcttttactaagagattttgttttaagt

SEQ ID NO: 65534 - DNA, 40 bp, Homo sapiens
cttaaaacaaaatctcttagtaaaagcatagtctagcaag

SEQ ID NO: 65535 - DNA, 40 bp, Homo sapiens
cttgctagactatgcttttactaagagattttgttttaag

SEQ ID NO: 65536 - DNA, 40 bp, Homo sapiens
ttaaaacaaaatctcttagtaaaagcatagtctagcaaga

SEQ ID NO: 65537 - DNA, 40 bp, Homo sapiens
tcttgctagactatgcttttactaagagattttgttttaa

SEQ ID NO: 65538 - DNA, 40 bp, Homo sapiens
taaaacaaaatctcttagtaaaagcatagtctagcaagat

SEQ ID NO: 65539 - DNA, 40 bp, Homo sapiens
atcttgctagactatgcttttactaagagattttgtttta

SEQ ID NO: 65540 - DNA, 40 bp, Homo sapiens
aaaacaaaatctcttagtaaaagcatagtctagcaagatt

SEQ ID NO: 65541 - DNA, 40 bp, Homo sapiens
aatcttgctagactatgcttttactaagagattttgtttt

SEQ ID NO: 65542 - DNA, 40 bp, Homo sapiens
aaacaaaatctcttagtaaaagcatagtctagcaagattt

SEQ ID NO: 65543 - DNA, 40 bp, Homo sapiens
aaatcttgctagactatgcttttactaagagattttgttt

SEQ ID NO: 65544 - DNA, 40 bp, Homo sapiens
aacaaaatctcttagtaaaagcatagtctagcaagattta

SEQ ID NO: 65545 - DNA, 40 bp, Homo sapiens
taaatcttgctagactatgcttttactaagagattttgtt

SEQ ID NO: 65546 - DNA, 40 bp, Homo sapiens
acaaaatctcttagtaaaagcatagtctagcaagatttag

SEQ ID NO: 65547 - DNA, 40 bp, Homo sapiens
ctaaatcttgctagactatgcttttactaagagattttgt

SEQ ID NO: 65548 - DNA, 40 bp, Homo sapiens
caaaatctcttagtaaaagcatagtctagcaagatttaga

SEQ ID NO: 65549 - DNA, 40 bp, Homo sapiens
tctaaatcttgctagactatgcttttactaagagattttg

SEQ ID NO: 65550 - DNA, 40 bp, Homo sapiens
aaaatctcttagtaaaagcatagtctagcaagatttagaa

SEQ ID NO: 65551 - DNA, 40 bp, Homo sapiens
ttctaaatcttgctagactatgcttttactaagagatttt

SEQ ID NO: 65552 - DNA, 40 bp, Homo sapiens
aaatctcttagtaaaagcatagtctagcaagatttagaat

SEQ ID NO: 65553 - DNA, 40 bp, Homo sapiens
attctaaatcttgctagactatgcttttactaagagattt

SEQ ID NO: 65554 - DNA, 40 bp, Homo sapiens
aatctcttagtaaaagcatagtctagcaagatttagaatg

SEQ ID NO: 65555 - DNA, 40 bp, Homo sapiens
cattctaaatcttgctagactatgcttttactaagagatt

SEQ ID NO: 65556 - DNA, 40 bp, Homo sapiens
atctcttagtaaaagcatagtctagcaagatttagaatga

SEQ ID NO: 65557 - DNA, 40 bp, Homo sapiens
tcattctaaatcttgctagactatgcttttactaagagat

SEQ ID NO: 65558 - DNA, 40 bp, Homo sapiens
tctcttagtaaaagcatagtctagcaagatttagaatgat

SEQ ID NO: 65559 - DNA, 40 bp, Homo sapiens
atcattctaaatcttgctagactatgcttttactaagaga

SEQ ID NO: 65560 - DNA, 40 bp, Homo sapiens
ctcttagtaaaagcatagtctagcaagatttagaatgata

SEQ ID NO: 65561 - DNA, 40 bp, Homo sapiens
tatcattctaaatcttgctagactatgcttttactaagag

SEQ ID NO: 65562 - DNA, 40 bp, Homo sapiens
tcttagtaaaagcatagtctagcaagatttagaatgatac

SEQ ID NO: 65563 - DNA, 40 bp, Homo sapiens
gtatcattctaaatcttgctagactatgcttttactaaga

SEQ ID NO: 65564 - DNA, 40 bp, Homo sapiens
cttagtaaaagcatagtctagcaagatttagaatgatact

SEQ ID NO: 65565 - DNA, 40 bp, Homo sapiens
agtatcattctaaatcttgctagactatgcttttactaag

SEQ ID NO: 65566 - DNA, 40 bp, Homo sapiens
ttagtaaaagcatagtctagcaagatttagaatgatactt

SEQ ID NO: 65567 - DNA, 40 bp, Homo sapiens
aagtatcattctaaatcttgctagactatgcttttactaa

SEQ ID NO: 65568 - DNA, 40 bp, Homo sapiens
tagtaaaagcatagtctagcaagatttagaatgatacttt

SEQ ID NO: 65569 - DNA, 40 bp, Homo sapiens
aaagtatcattctaaatcttgctagactatgcttttacta

SEQ ID NO: 65570 - DNA, 40 bp, Homo sapiens
agtaaaagcatagtctagcaagatttagaatgatactttg

SEQ ID NO: 65571 - DNA, 40 bp, Homo sapiens
caaagtatcattctaaatcttgctagactatgcttttact

SEQ ID NO: 65572 - DNA, 40 bp, Homo sapiens
gtaaaagcatagtctagcaagatttagaatgatactttgg

SEQ ID NO: 65573 - DNA, 40 bp, Homo sapiens
ccaaagtatcattctaaatcttgctagactatgcttttac

SEQ ID NO: 65574 - DNA, 40 bp, Homo sapiens
taaaagcatagtctagcaagatttagaatgatactttggc

SEQ ID NO: 65575 - DNA, 40 bp, Homo sapiens
gccaaagtatcattctaaatcttgctagactatgctttta

SEQ ID NO: 65576 - DNA, 40 bp, Homo sapiens
aaaagcatagtctagcaagatttagaatgatactttggct

SEQ ID NO: 65577 - DNA, 40 bp, Homo sapiens
agccaaagtatcattctaaatcttgctagactatgctttt

SEQ ID NO: 65578 - DNA, 40 bp, Homo sapiens
aaagcatagtctagcaagatttagaatgatactttggcta

SEQ ID NO: 65579 - DNA, 40 bp, Homo sapiens
tagccaaagtatcattctaaatcttgctagactatgcttt

SEQ ID NO: 65580 - DNA, 40 bp, Homo sapiens
aagcatagtctagcaagatttagaatgatactttggctaa

SEQ ID NO: 65581 - DNA, 40 bp, Homo sapiens
ttagccaaagtatcattctaaatcttgctagactatgctt

SEQ ID NO: 65582 - DNA, 40 bp, Homo sapiens
agcatagtctagcaagatttagaatgatactttggctaac

SEQ ID NO: 65583 - DNA, 40 bp, Homo sapiens
gttagccaaagtatcattctaaatcttgctagactatgct

SEQ ID NO: 65584 - DNA, 40 bp, Homo sapiens
gcatagtctagcaagatttagaatgatactttggctaaca

SEQ ID NO: 65585 - DNA, 40 bp, Homo sapiens
tgttagccaaagtatcattctaaatcttgctagactatgc

SEQ ID NO: 65586 - DNA, 40 bp, Homo sapiens
catagtctagcaagatttagaatgatactttggctaacag

SEQ ID NO: 65587 - DNA, 40 bp, Homo sapiens
ctgttagccaaagtatcattctaaatcttgctagactatg

SEQ ID NO: 65588 - DNA, 40 bp, Homo sapiens
atagtctagcaagatttagaatgatactttggctaacagt

SEQ ID NO: 65589 - DNA, 40 bp, Homo sapiens
actgttagccaaagtatcattctaaatcttgctagactat

SEQ ID NO: 65590 - DNA, 40 bp, Homo sapiens
tagtctagcaagatttagaatgatactttggctaacagta

SEQ ID NO: 65591 - DNA, 40 bp, Homo sapiens
tactgttagccaaagtatcattctaaatcttgctagacta

SEQ ID NO: 65592 - DNA, 40 bp, Homo sapiens
agtctagcaagatttagaatgatactttggctaacagtac

SEQ ID NO: 65593 - DNA, 40 bp, Homo sapiens
gtactgttagccaaagtatcattctaaatcttgctagact

SEQ ID NO: 65594 - DNA, 40 bp, Homo sapiens
gtctagcaagatttagaatgatactttggctaacagtact

SEQ ID NO: 65595 - DNA, 40 bp, Homo sapiens
agtactgttagccaaagtatcattctaaatcttgctagac

SEQ ID NO: 65596 - DNA, 40 bp, Homo sapiens
tctagcaagatttagaatgatactttggctaacagtactt

SEQ ID NO: 65597 - DNA, 40 bp, Homo sapiens
aagtactgttagccaaagtatcattctaaatcttgctaga

SEQ ID NO: 65598 - DNA, 40 bp, Homo sapiens
ctagcaagatttagaatgatactttggctaacagtacttt

SEQ ID NO: 65599 - DNA, 40 bp, Homo sapiens
aaagtactgttagccaaagtatcattctaaatcttgctag

SEQ ID NO: 65600 - DNA, 40 bp, Homo sapiens
tagcaagatttagaatgatactttggctaacagtactttc

SEQ ID NO: 65601 - DNA, 40 bp, Homo sapiens
gaaagtactgttagccaaagtatcattctaaatcttgcta

SEQ ID NO: 65602 - DNA, 40 bp, Homo sapiens
agcaagatttagaatgatactttggctaacagtactttct

SEQ ID NO: 65603 - DNA, 40 bp, Homo sapiens
agaaagtactgttagccaaagtatcattctaaatcttgct

SEQ ID NO: 65604 - DNA, 40 bp, Homo sapiens
gcaagatttagaatgatactttggctaacagtactttctc

SEQ ID NO: 65605 - DNA, 40 bp, Homo sapiens
gagaaagtactgttagccaaagtatcattctaaatcttgc

SEQ ID NO: 65606 - DNA, 40 bp, Homo sapiens
caagatttagaatgatactttggctaacagtactttctct

SEQ ID NO: 65607 - DNA, 40 bp, Homo sapiens
agagaaagtactgttagccaaagtatcattctaaatcttg

SEQ ID NO: 65608 - DNA, 40 bp, Homo sapiens
aagatttagaatgatactttggctaacagtactttctcta

SEQ ID NO: 65609 - DNA, 40 bp, Homo sapiens
tagagaaagtactgttagccaaagtatcattctaaatctt

SEQ ID NO: 65610 - DNA, 40 bp, Homo sapiens
agatttagaatgatactttggctaacagtactttctctat

SEQ ID NO: 65611 - DNA, 40 bp, Homo sapiens
atagagaaagtactgttagccaaagtatcattctaaatct

SEQ ID NO: 65612 - DNA, 40 bp, Homo sapiens
gatttagaatgatactttggctaacagtactttctctata

SEQ ID NO: 65613 - DNA, 40 bp, Homo sapiens
tatagagaaagtactgttagccaaagtatcattctaaatc

SEQ ID NO: 65614 - DNA, 40 bp, Homo sapiens
atttagaatgatactttggctaacagtactttctctatat

SEQ ID NO: 65615 - DNA, 40 bp, Homo sapiens
atatagagaaagtactgttagccaaagtatcattctaaat

SEQ ID NO: 65616 - DNA, 40 bp, Homo sapiens
tttagaatgatactttggctaacagtactttctctatatg

SEQ ID NO: 65617 - DNA, 40 bp, Homo sapiens
catatagagaaagtactgttagccaaagtatcattctaaa

SEQ ID NO: 65618 - DNA, 40 bp, Homo sapiens
ttagaatgatactttggctaacagtactttctctatatgg

SEQ ID NO: 65619 - DNA, 40 bp, Homo sapiens
ccatatagagaaagtactgttagccaaagtatcattctaa

SEQ ID NO: 65620 - DNA, 40 bp, Homo sapiens
tagaatgatactttggctaacagtactttctctatatgga

SEQ ID NO: 65621 - DNA, 40 bp, Homo sapiens
tccatatagagaaagtactgttagccaaagtatcattcta

SEQ ID NO: 65622 - DNA, 40 bp, Homo sapiens
agaatgatactttggctaacagtactttctctatatggag

SEQ ID NO: 65623 - DNA, 40 bp, Homo sapiens
ctccatatagagaaagtactgttagccaaagtatcattct

SEQ ID NO: 65624 - DNA, 40 bp, Homo sapiens
gaatgatactttggctaacagtactttctctatatggagt

SEQ ID NO: 65625 - DNA, 40 bp, Homo sapiens
actccatatagagaaagtactgttagccaaagtatcattc

SEQ ID NO: 65626 - DNA, 40 bp, Homo sapiens
aatgatactttggctaacagtactttctctatatggagtg

SEQ ID NO: 65627 - DNA, 40 bp, Homo sapiens
cactccatatagagaaagtactgttagccaaagtatcatt

SEQ ID NO: 65628 - DNA, 40 bp, Homo sapiens
atgatactttggctaacagtactttctctatatggagtgc

SEQ ID NO: 65629 - DNA, 40 bp, Homo sapiens
gcactccatatagagaaagtactgttagccaaagtatcat

SEQ ID NO: 65630 - DNA, 40 bp, Homo sapiens
tgatactttggctaacagtactttctctatatggagtgct

SEQ ID NO: 65631 - DNA, 40 bp, Homo sapiens
agcactccatatagagaaagtactgttagccaaagtatca

SEQ ID NO: 65632 - DNA, 40 bp, Homo sapiens
gatactttggctaacagtactttctctatatggagtgctt

SEQ ID NO: 65633 - DNA, 40 bp, Homo sapiens
aagcactccatatagagaaagtactgttagccaaagtatc

SEQ ID NO: 65634 - DNA, 40 bp, Homo sapiens
atactttggctaacagtactttctctatatggagtgcttt

SEQ ID NO: 65635 - DNA, 40 bp, Homo sapiens
aaagcactccatatagagaaagtactgttagccaaagtat

SEQ ID NO: 65636 - DNA, 40 bp, Homo sapiens
tactttggctaacagtactttctctatatggagtgctttg

SEQ ID NO: 65637 - DNA, 40 bp, Homo sapiens
caaagcactccatatagagaaagtactgttagccaaagta

SEQ ID NO: 65638 - DNA, 40 bp, Homo sapiens
actttggctaacagtactttctctatatggagtgctttgt

SEQ ID NO: 65639 - DNA, 40 bp, Homo sapiens
acaaagcactccatatagagaaagtactgttagccaaagt

SEQ ID NO: 65640 - DNA, 40 bp, Homo sapiens
ctttggctaacagtactttctctatatggagtgctttgtt

SEQ ID NO: 65641 - DNA, 40 bp, Homo sapiens
aacaaagcactccatatagagaaagtactgttagccaaag

SEQ ID NO: 65642 - DNA, 40 bp, Homo sapiens
tttggctaacagtactttctctatatggagtgctttgttt

SEQ ID NO: 65643 - DNA, 40 bp, Homo sapiens
aaacaaagcactccatatagagaaagtactgttagccaaa

SEQ ID NO: 65644 - DNA, 40 bp, Homo sapiens
ttggctaacagtactttctctatatggagtgctttgtttc

SEQ ID NO: 65645 - DNA, 40 bp, Homo sapiens
gaaacaaagcactccatatagagaaagtactgttagccaa

SEQ ID NO: 65646 - DNA, 40 bp, Homo sapiens
tggctaacagtactttctctatatggagtgctttgtttcc

SEQ ID NO: 65647 - DNA, 40 bp, Homo sapiens
ggaaacaaagcactccatatagagaaagtactgttagcca

SEQ ID NO: 65648 - DNA, 40 bp, Homo sapiens
ggctaacagtactttctctatatggagtgctttgtttcca

SEQ ID NO: 65649 - DNA, 40 bp, Homo sapiens
tggaaacaaagcactccatatagagaaagtactgttagcc

SEQ ID NO: 65650 - DNA, 40 bp, Homo sapiens
gctaacagtactttctctatatggagtgctttgtttccat

SEQ ID NO: 65651 - DNA, 40 bp, Homo sapiens
atggaaacaaagcactccatatagagaaagtactgttagc

SEQ ID NO: 65652 - DNA, 40 bp, Homo sapiens
ctaacagtactttctctatatggagtgctttgtttccata

SEQ ID NO: 65653 - DNA, 40 bp, Homo sapiens
tatggaaacaaagcactccatatagagaaagtactgttag

SEQ ID NO: 65654 - DNA, 40 bp, Homo sapiens
taacagtactttctctatatggagtgctttgtttccatag

SEQ ID NO: 65655 - DNA, 40 bp, Homo sapiens
ctatggaaacaaagcactccatatagagaaagtactgtta

SEQ ID NO: 65656 - DNA, 40 bp, Homo sapiens
aacagtactttctctatatggagtgctttgtttccatagc

SEQ ID NO: 65657 - DNA, 40 bp, Homo sapiens
gctatggaaacaaagcactccatatagagaaagtactgtt

SEQ ID NO: 65658 - DNA, 40 bp, Homo sapiens
acagtactttctctatatggagtgctttgtttccatagcc

SEQ ID NO: 65659 - DNA, 40 bp, Homo sapiens
ggctatggaaacaaagcactccatatagagaaagtactgt

SEQ ID NO: 65660 - DNA, 40 bp, Homo sapiens
cagtactttctctatatggagtgctttgtttccatagcct

SEQ ID NO: 65661 - DNA, 40 bp, Homo sapiens
aggctatggaaacaaagcactccatatagagaaagtactg

SEQ ID NO: 65662 - DNA, 40 bp, Homo sapiens
agtactttctctatatggagtgctttgtttccatagcctc

SEQ ID NO: 65663 - DNA, 40 bp, Homo sapiens
gaggctatggaaacaaagcactccatatagagaaagtact

SEQ ID NO: 65664 - DNA, 40 bp, Homo sapiens
gtactttctctatatggagtgctttgtttccatagcctca

SEQ ID NO: 65665 - DNA, 40 bp, Homo sapiens
tgaggctatggaaacaaagcactccatatagagaaagtac

SEQ ID NO: 65666 - DNA, 40 bp, Homo sapiens
tactttctctatatggagtgctttgtttccatagcctcac

SEQ ID NO: 65667 - DNA, 40 bp, Homo sapiens
gtgaggctatggaaacaaagcactccatatagagaaagta

SEQ ID NO: 65668 - DNA, 40 bp, Homo sapiens
actttctctatatggagtgctttgtttccatagcctcaca

SEQ ID NO: 65669 - DNA, 40 bp, Homo sapiens
tgtgaggctatggaaacaaagcactccatatagagaaagt

SEQ ID NO: 65670 - DNA, 40 bp, Homo sapiens
ctttctctatatggagtgctttgtttccatagcctcacaa

SEQ ID NO: 65671 - DNA, 40 bp, Homo sapiens
ttgtgaggctatggaaacaaagcactccatatagagaaag

SEQ ID NO: 65672 - DNA, 40 bp, Homo sapiens
tttctctatatggagtgctttgtttccatagcctcacaag

SEQ ID NO: 65673 - DNA, 40 bp, Homo sapiens
cttgtgaggctatggaaacaaagcactccatatagagaaa

SEQ ID NO: 65674 - DNA, 40 bp, Homo sapiens
ttctctatatggagtgctttgtttccatagcctcacaagt

SEQ ID NO: 65675 - DNA, 40 bp, Homo sapiens
acttgtgaggctatggaaacaaagcactccatatagagaa

SEQ ID NO: 65676 - DNA, 40 bp, Homo sapiens
tctctatatggagtgctttgtttccatagcctcacaagta

SEQ ID NO: 65677 - DNA, 40 bp, Homo sapiens
tacttgtgaggctatggaaacaaagcactccatatagaga

SEQ ID NO: 65678 - DNA, 40 bp, Homo sapiens
ctctatatggagtgctttgtttccatagcctcacaagtat

SEQ ID NO: 65679 - DNA, 40 bp, Homo sapiens
atacttgtgaggctatggaaacaaagcactccatatagag

SEQ ID NO: 65680 - DNA, 40 bp, Homo sapiens
tctatatggagtgctttgtttccatagcctcacaagtatg

SEQ ID NO: 65681 - DNA, 40 bp, Homo sapiens
catacttgtgaggctatggaaacaaagcactccatataga

SEQ ID NO: 65682 - DNA, 40 bp, Homo sapiens
ctatatggagtgctttgtttccatagcctcacaagtatgt

SEQ ID NO: 65683 - DNA, 40 bp, Homo sapiens
acatacttgtgaggctatggaaacaaagcactccatatag

SEQ ID NO: 65684 - DNA, 40 bp, Homo sapiens
tatatggagtgctttgtttccatagcctcacaagtatgtt

SEQ ID NO: 65685 - DNA, 40 bp, Homo sapiens
aacatacttgtgaggctatggaaacaaagcactccatata

SEQ ID NO: 65686 - DNA, 40 bp, Homo sapiens
atatggagtgctttgtttccatagcctcacaagtatgttt

SEQ ID NO: 65687 - DNA, 40 bp, Homo sapiens
aaacatacttgtgaggctatggaaacaaagcactccatat

SEQ ID NO: 65688 - DNA, 40 bp, Homo sapiens
tatggagtgctttgtttccatagcctcacaagtatgtttt

SEQ ID NO: 65689 - DNA, 40 bp, Homo sapiens
aaaacatacttgtgaggctatggaaacaaagcactccata

SEQ ID NO: 65690 - DNA, 40 bp, Homo sapiens
atggagtgctttgtttccatagcctcacaagtatgttttc

SEQ ID NO: 65691 - DNA, 40 bp, Homo sapiens
gaaaacatacttgtgaggctatggaaacaaagcactccat

SEQ ID NO: 65692 - DNA, 40 bp, Homo sapiens
tggagtgctttgtttccatagcctcacaagtatgttttca

SEQ ID NO: 65693 - DNA, 40 bp, Homo sapiens
tgaaaacatacttgtgaggctatggaaacaaagcactcca

SEQ ID NO: 65694 - DNA, 40 bp, Homo sapiens
ggagtgctttgtttccatagcctcacaagtatgttttcag

SEQ ID NO: 65695 - DNA, 40 bp, Homo sapiens
ctgaaaacatacttgtgaggctatggaaacaaagcactcc

SEQ ID NO: 65696 - DNA, 40 bp, Homo sapiens
gagtgctttgtttccatagcctcacaagtatgttttcaga

SEQ ID NO: 65697 - DNA, 40 bp, Homo sapiens
tctgaaaacatacttgtgaggctatggaaacaaagcactc

SEQ ID NO: 65698 - DNA, 40 bp, Homo sapiens
agtgctttgtttccatagcctcacaagtatgttttcagat

SEQ ID NO: 65699 - DNA, 40 bp, Homo sapiens
atctgaaaacatacttgtgaggctatggaaacaaagcact

SEQ ID NO: 65700 - DNA, 40 bp, Homo sapiens
gtgctttgtttccatagcctcacaagtatgttttcagata

SEQ ID NO: 65701 - DNA, 40 bp, Homo sapiens
tatctgaaaacatacttgtgaggctatggaaacaaagcac

SEQ ID NO: 65702 - DNA, 40 bp, Homo sapiens
tgctttgtttccatagcctcacaagtatgttttcagataa

SEQ ID NO: 65703 - DNA, 40 bp, Homo sapiens
ttatctgaaaacatacttgtgaggctatggaaacaaagca

SEQ ID NO: 65704 - DNA, 40 bp, Homo sapiens
gctttgtttccatagcctcacaagtatgttttcagataat

SEQ ID NO: 65705 - DNA, 40 bp, Homo sapiens
attatctgaaaacatacttgtgaggctatggaaacaaagc

SEQ ID NO: 65706 - DNA, 40 bp, Homo sapiens
ctttgtttccatagcctcacaagtatgttttcagataata

SEQ ID NO: 65707 - DNA, 40 bp, Homo sapiens
tattatctgaaaacatacttgtgaggctatggaaacaaag

SEQ ID NO: 65708 - DNA, 40 bp, Homo sapiens
tttgtttccatagcctcacaagtatgttttcagataatag

SEQ ID NO: 65709 - DNA, 40 bp, Homo sapiens
ctattatctgaaaacatacttgtgaggctatggaaacaaa

SEQ ID NO: 65710 - DNA, 40 bp, Homo sapiens
ttgtttccatagcctcacaagtatgttttcagataatagt

SEQ ID NO: 65711 - DNA, 40 bp, Homo sapiens
actattatctgaaaacatacttgtgaggctatggaaacaa

SEQ ID NO: 65712 - DNA, 40 bp, Homo sapiens
tgtttccatagcctcacaagtatgttttcagataatagtt

SEQ ID NO: 65713 - DNA, 40 bp, Homo sapiens
aactattatctgaaaacatacttgtgaggctatggaaaca

SEQ ID NO: 65714 - DNA, 40 bp, Homo sapiens
gtttccatagcctcacaagtatgttttcagataatagttg

SEQ ID NO: 65715 - DNA, 40 bp, Homo sapiens
caactattatctgaaaacatacttgtgaggctatggaaac

SEQ ID NO: 65716 - DNA, 40 bp, Homo sapiens
tttccatagcctcacaagtatgttttcagataatagttga

SEQ ID NO: 65717 - DNA, 40 bp, Homo sapiens
tcaactattatctgaaaacatacttgtgaggctatggaaa

SEQ ID NO: 65718 - DNA, 40 bp, Homo sapiens
ttccatagcctcacaagtatgttttcagataatagttgag

SEQ ID NO: 65719 - DNA, 40 bp, Homo sapiens
ctcaactattatctgaaaacatacttgtgaggctatggaa

SEQ ID NO: 65720 - DNA, 40 bp, Homo sapiens
tccatagcctcacaagtatgttttcagataatagttgagt

SEQ ID NO: 65721 - DNA, 40 bp, Homo sapiens
actcaactattatctgaaaacatacttgtgaggctatgga

SEQ ID NO: 65722 - DNA, 40 bp, Homo sapiens
ccatagcctcacaagtatgttttcagataatagttgagtt

SEQ ID NO: 65723 - DNA, 40 bp, Homo sapiens
aactcaactattatctgaaaacatacttgtgaggctatgg

SEQ ID NO: 65724 - DNA, 40 bp, Homo sapiens
catagcctcacaagtatgttttcagataatagttgagttg

SEQ ID NO: 65725 - DNA, 40 bp, Homo sapiens
caactcaactattatctgaaaacatacttgtgaggctatg

SEQ ID NO: 65726 - DNA, 40 bp, Homo sapiens
atagcctcacaagtatgttttcagataatagttgagttga

SEQ ID NO: 65727 - DNA, 40 bp, Homo sapiens
tcaactcaactattatctgaaaacatacttgtgaggctat

SEQ ID NO: 65728 - DNA, 40 bp, Homo sapiens
tagcctcacaagtatgttttcagataatagttgagttgaa

SEQ ID NO: 65729 - DNA, 40 bp, Homo sapiens
ttcaactcaactattatctgaaaacatacttgtgaggcta

SEQ ID NO: 65730 - DNA, 40 bp, Homo sapiens
agcctcacaagtatgttttcagataatagttgagttgaaa

SEQ ID NO: 65731 - DNA, 40 bp, Homo sapiens
tttcaactcaactattatctgaaaacatacttgtgaggct

SEQ ID NO: 65732 - DNA, 40 bp, Homo sapiens
gcctcacaagtatgttttcagataatagttgagttgaaaa

SEQ ID NO: 65733 - DNA, 40 bp, Homo sapiens
ttttcaactcaactattatctgaaaacatacttgtgaggc

SEQ ID NO: 65734 - DNA, 40 bp, Homo sapiens
cctcacaagtatgttttcagataatagttgagttgaaaat

SEQ ID NO: 65735 - DNA, 40 bp, Homo sapiens
attttcaactcaactattatctgaaaacatacttgtgagg

SEQ ID NO: 65736 - DNA, 40 bp, Homo sapiens
ctcacaagtatgttttcagataatagttgagttgaaaatg

SEQ ID NO: 65737 - DNA, 40 bp, Homo sapiens
cattttcaactcaactattatctgaaaacatacttgtgag

SEQ ID NO: 65738 - DNA, 40 bp, Homo sapiens
tcacaagtatgttttcagataatagttgagttgaaaatgt

SEQ ID NO: 65739 - DNA, 40 bp, Homo sapiens
acattttcaactcaactattatctgaaaacatacttgtga

SEQ ID NO: 65740 - DNA, 40 bp, Homo sapiens
cacaagtatgttttcagataatagttgagttgaaaatgtt

SEQ ID NO: 65741 - DNA, 40 bp, Homo sapiens
aacattttcaactcaactattatctgaaaacatacttgtg

SEQ ID NO: 65742 - DNA, 40 bp, Homo sapiens
acaagtatgttttcagataatagttgagttgaaaatgttg

SEQ ID NO: 65743 - DNA, 40 bp, Homo sapiens
caacattttcaactcaactattatctgaaaacatacttgt

SEQ ID NO: 65744 - DNA, 40 bp, Homo sapiens
caagtatgttttcagataatagttgagttgaaaatgttgt

SEQ ID NO: 65745 - DNA, 40 bp, Homo sapiens
acaacattttcaactcaactattatctgaaaacatacttg

SEQ ID NO: 65746 - DNA, 40 bp, Homo sapiens
aagtatgttttcagataatagttgagttgaaaatgttgtc

SEQ ID NO: 65747 - DNA, 40 bp, Homo sapiens
gacaacattttcaactcaactattatctgaaaacatactt

SEQ ID NO: 65748 - DNA, 40 bp, Homo sapiens
agtatgttttcagataatagttgagttgaaaatgttgtca

SEQ ID NO: 65749 - DNA, 40 bp, Homo sapiens
tgacaacattttcaactcaactattatctgaaaacatact

SEQ ID NO: 65750 - DNA, 40 bp, Homo sapiens
gtatgttttcagataatagttgagttgaaaatgttgtcaa

SEQ ID NO: 65751 - DNA, 40 bp, Homo sapiens
ttgacaacattttcaactcaactattatctgaaaacatac

SEQ ID NO: 65752 - DNA, 40 bp, Homo sapiens
tatgttttcagataatagttgagttgaaaatgttgtcaat

SEQ ID NO: 65753 - DNA, 40 bp, Homo sapiens
attgacaacattttcaactcaactattatctgaaaacata

SEQ ID NO: 65754 - DNA, 40 bp, Homo sapiens
atgttttcagataatagttgagttgaaaatgttgtcaatc

SEQ ID NO: 65755 - DNA, 40 bp, Homo sapiens
gattgacaacattttcaactcaactattatctgaaaacat

SEQ ID NO: 65756 - DNA, 40 bp, Homo sapiens
tgttttcagataatagttgagttgaaaatgttgtcaatct

SEQ ID NO: 65757 - DNA, 40 bp, Homo sapiens
agattgacaacattttcaactcaactattatctgaaaaca

SEQ ID NO: 65758 - DNA, 40 bp, Homo sapiens
gttttcagataatagttgagttgaaaatgttgtcaatctc

SEQ ID NO: 65759 - DNA, 40 bp, Homo sapiens
gagattgacaacattttcaactcaactattatctgaaaac

SEQ ID NO: 65760 - DNA, 40 bp, Homo sapiens
ttttcagataatagttgagttgaaaatgttgtcaatctct

SEQ ID NO: 65761 - DNA, 40 bp, Homo sapiens
agagattgacaacattttcaactcaactattatctgaaaa

SEQ ID NO: 65762 - DNA, 40 bp, Homo sapiens
tttcagataatagttgagttgaaaatgttgtcaatctctt

SEQ ID NO: 65763 - DNA, 40 bp, Homo sapiens
aagagattgacaacattttcaactcaactattatctgaaa

SEQ ID NO: 65764 - DNA, 40 bp, Homo sapiens
ttcagataatagttgagttgaaaatgttgtcaatctcttg

SEQ ID NO: 65765 - DNA, 40 bp, Homo sapiens
caagagattgacaacattttcaactcaactattatctgaa

SEQ ID NO: 65766 - DNA, 40 bp, Homo sapiens
tcagataatagttgagttgaaaatgttgtcaatctcttga

SEQ ID NO: 65767 - DNA, 40 bp, Homo sapiens
tcaagagattgacaacattttcaactcaactattatctga

SEQ ID NO: 65768 - DNA, 40 bp, Homo sapiens
cagataatagttgagttgaaaatgttgtcaatctcttgat

SEQ ID NO: 65769 - DNA, 40 bp, Homo sapiens
atcaagagattgacaacattttcaactcaactattatctg

SEQ ID NO: 65770 - DNA, 40 bp, Homo sapiens
agataatagttgagttgaaaatgttgtcaatctcttgatt

SEQ ID NO: 65771 - DNA, 40 bp, Homo sapiens
aatcaagagattgacaacattttcaactcaactattatct

SEQ ID NO: 65772 - DNA, 40 bp, Homo sapiens
gataatagttgagttgaaaatgttgtcaatctcttgattt

SEQ ID NO: 65773 - DNA, 40 bp, Homo sapiens
aaatcaagagattgacaacattttcaactcaactattatc

SEQ ID NO: 65774 - DNA, 40 bp, Homo sapiens
ataatagttgagttgaaaatgttgtcaatctcttgatttt

SEQ ID NO: 65775 - DNA, 40 bp, Homo sapiens
aaaatcaagagattgacaacattttcaactcaactattat

SEQ ID NO: 65776 - DNA, 40 bp, Homo sapiens
taatagttgagttgaaaatgttgtcaatctcttgatttta

SEQ ID NO: 65777 - DNA, 40 bp, Homo sapiens
taaaatcaagagattgacaacattttcaactcaactatta

SEQ ID NO: 65778 - DNA, 40 bp, Homo sapiens
aatagttgagttgaaaatgttgtcaatctcttgattttaa

SEQ ID NO: 65779 - DNA, 40 bp, Homo sapiens
ttaaaatcaagagattgacaacattttcaactcaactatt

SEQ ID NO: 65780 - DNA, 40 bp, Homo sapiens
atagttgagttgaaaatgttgtcaatctcttgattttaaa

SEQ ID NO: 65781 - DNA, 40 bp, Homo sapiens
tttaaaatcaagagattgacaacattttcaactcaactat

SEQ ID NO: 65782 - DNA, 40 bp, Homo sapiens
tagttgagttgaaaatgttgtcaatctcttgattttaaaa

SEQ ID NO: 65783 - DNA, 40 bp, Homo sapiens
ttttaaaatcaagagattgacaacattttcaactcaacta

SEQ ID NO: 65784 - DNA, 40 bp, Homo sapiens
agttgagttgaaaatgttgtcaatctcttgattttaaaaa

SEQ ID NO: 65785 - DNA, 40 bp, Homo sapiens
tttttaaaatcaagagattgacaacattttcaactcaact

SEQ ID NO: 65786 - DNA, 40 bp, Homo sapiens
gttgagttgaaaatgttgtcaatctcttgattttaaaaaa

SEQ ID NO: 65787 - DNA, 40 bp, Homo sapiens
ttttttaaaatcaagagattgacaacattttcaactcaac

SEQ ID NO: 65788 - DNA, 40 bp, Homo sapiens
ttgagttgaaaatgttgtcaatctcttgattttaaaaaat

SEQ ID NO: 65789 - DNA, 40 bp, Homo sapiens
attttttaaaatcaagagattgacaacattttcaactcaa

SEQ ID NO: 65790 - DNA, 40 bp, Homo sapiens
tgagttgaaaatgttgtcaatctcttgattttaaaaaatt

SEQ ID NO: 65791 - DNA, 40 bp, Homo sapiens
aattttttaaaatcaagagattgacaacattttcaactca

SEQ ID NO: 65792 - DNA, 40 bp, Homo sapiens
gagttgaaaatgttgtcaatctcttgattttaaaaaattt

SEQ ID NO: 65793 - DNA, 40 bp, Homo sapiens
aaattttttaaaatcaagagattgacaacattttcaactc

SEQ ID NO: 65794 - DNA, 40 bp, Homo sapiens
agttgaaaatgttgtcaatctcttgattttaaaaaattta

SEQ ID NO: 65795 - DNA, 40 bp, Homo sapiens
taaattttttaaaatcaagagattgacaacattttcaact

SEQ ID NO: 65796 - DNA, 40 bp, Homo sapiens
gttgaaaatgttgtcaatctcttgattttaaaaaatttac

SEQ ID NO: 65797 - DNA, 40 bp, Homo sapiens
gtaaattttttaaaatcaagagattgacaacattttcaac

SEQ ID NO: 65798 - DNA, 40 bp, Homo sapiens
ttgaaaatgttgtcaatctcttgattttaaaaaatttaca

SEQ ID NO: 65799 - DNA, 40 bp, Homo sapiens
tgtaaattttttaaaatcaagagattgacaacattttcaa

SEQ ID NO: 65800 - DNA, 40 bp, Homo sapiens
tgaaaatgttgtcaatctcttgattttaaaaaatttacat

SEQ ID NO: 65801 - DNA, 40 bp, Homo sapiens
atgtaaattttttaaaatcaagagattgacaacattttca

SEQ ID NO: 65802 - DNA, 40 bp, Homo sapiens
gaaaatgttgtcaatctcttgattttaaaaaatttacata

SEQ ID NO: 65803 - DNA, 40 bp, Homo sapiens
tatgtaaattttttaaaatcaagagattgacaacattttc

SEQ ID NO: 65804 - DNA, 40 bp, Homo sapiens
aaaatgttgtcaatctcttgattttaaaaaatttacatat

SEQ ID NO: 65805 - DNA, 40 bp, Homo sapiens
atatgtaaattttttaaaatcaagagattgacaacatttt

SEQ ID NO: 65806 - DNA, 40 bp, Homo sapiens
aaatgttgtcaatctcttgattttaaaaaatttacatatt

SEQ ID NO: 65807 - DNA, 40 bp, Homo sapiens
aatatgtaaattttttaaaatcaagagattgacaacattt

SEQ ID NO: 65808 - DNA, 40 bp, Homo sapiens
aatgttgtcaatctcttgattttaaaaaatttacatattt

SEQ ID NO: 65809 - DNA, 40 bp, Homo sapiens
aaatatgtaaattttttaaaatcaagagattgacaacatt

SEQ ID NO: 65810 - DNA, 40 bp, Homo sapiens
atgttgtcaatctcttgattttaaaaaatttacatattta

SEQ ID NO: 65811 - DNA, 40 bp, Homo sapiens
taaatatgtaaattttttaaaatcaagagattgacaacat

SEQ ID NO: 65812 - DNA, 40 bp, Homo sapiens
tgttgtcaatctcttgattttaaaaaatttacatatttaa

SEQ ID NO: 65813 - DNA, 40 bp, Homo sapiens
ttaaatatgtaaattttttaaaatcaagagattgacaaca

SEQ ID NO: 65814 - DNA, 40 bp, Homo sapiens
gttgtcaatctcttgattttaaaaaatttacatatttaaa

SEQ ID NO: 65815 - DNA, 40 bp, Homo sapiens
tttaaatatgtaaattttttaaaatcaagagattgacaac

SEQ ID NO: 65816 - DNA, 40 bp, Homo sapiens
ttgtcaatctcttgattttaaaaaatttacatatttaaag

SEQ ID NO: 65817 - DNA, 40 bp, Homo sapiens
ctttaaatatgtaaattttttaaaatcaagagattgacaa

SEQ ID NO: 65818 - DNA, 40 bp, Homo sapiens
tgtcaatctcttgattttaaaaaatttacatatttaaagt

SEQ ID NO: 65819 - DNA, 40 bp, Homo sapiens
actttaaatatgtaaattttttaaaatcaagagattgaca

SEQ ID NO: 65820 - DNA, 40 bp, Homo sapiens
gtcaatctcttgattttaaaaaatttacatatttaaagtt

SEQ ID NO: 65821 - DNA, 40 bp, Homo sapiens
aactttaaatatgtaaattttttaaaatcaagagattgac

SEQ ID NO: 65822 - DNA, 40 bp, Homo sapiens
tcaatctcttgattttaaaaaatttacatatttaaagttg

SEQ ID NO: 65823 - DNA, 40 bp, Homo sapiens
caactttaaatatgtaaattttttaaaatcaagagattga

SEQ ID NO: 65824 - DNA, 40 bp, Homo sapiens
caatctcttgattttaaaaaatttacatatttaaagttgt

SEQ ID NO: 65825 - DNA, 40 bp, Homo sapiens
acaactttaaatatgtaaattttttaaaatcaagagattg

SEQ ID NO: 65826 - DNA, 40 bp, Homo sapiens
aatctcttgattttaaaaaatttacatatttaaagttgta

SEQ ID NO: 65827 - DNA, 40 bp, Homo sapiens
tacaactttaaatatgtaaattttttaaaatcaagagatt

SEQ ID NO: 65828 - DNA, 40 bp, Homo sapiens
atctcttgattttaaaaaatttacatatttaaagttgtat

SEQ ID NO: 65829 - DNA, 40 bp, Homo sapiens
atacaactttaaatatgtaaattttttaaaatcaagagat

SEQ ID NO: 65830 - DNA, 40 bp, Homo sapiens
tctcttgattttaaaaaatttacatatttaaagttgtata

SEQ ID NO: 65831 - DNA, 40 bp, Homo sapiens
tatacaactttaaatatgtaaattttttaaaatcaagaga

SEQ ID NO: 65832 - DNA, 40 bp, Homo sapiens
ctcttgattttaaaaaatttacatatttaaagttgtatac

SEQ ID NO: 65833 - DNA, 40 bp, Homo sapiens
gtatacaactttaaatatgtaaattttttaaaatcaagag

SEQ ID NO: 65834 - DNA, 40 bp, Homo sapiens
tcttgattttaaaaaatttacatatttaaagttgtatact

SEQ ID NO: 65835 - DNA, 40 bp, Homo sapiens
agtatacaactttaaatatgtaaattttttaaaatcaaga

SEQ ID NO: 65836 - DNA, 40 bp, Homo sapiens
cttgattttaaaaaatttacatatttaaagttgtatactt

SEQ ID NO: 65837 - DNA, 40 bp, Homo sapiens
aagtatacaactttaaatatgtaaattttttaaaatcaag

SEQ ID NO: 65838 - DNA, 40 bp, Homo sapiens
ttgattttaaaaaatttacatatttaaagttgtatacttt

SEQ ID NO: 65839 - DNA, 40 bp, Homo sapiens
aaagtatacaactttaaatatgtaaattttttaaaatcaa

SEQ ID NO: 65840 - DNA, 40 bp, Homo sapiens
tgattttaaaaaatttacatatttaaagttgtatactttt

SEQ ID NO: 65841 - DNA, 40 bp, Homo sapiens
aaaagtatacaactttaaatatgtaaattttttaaaatca

SEQ ID NO: 65842 - DNA, 40 bp, Homo sapiens
gattttaaaaaatttacatatttaaagttgtatacttttg

SEQ ID NO: 65843 - DNA, 40 bp, Homo sapiens
caaaagtatacaactttaaatatgtaaattttttaaaatc

SEQ ID NO: 65844 - DNA, 40 bp, Homo sapiens
attttaaaaaatttacatatttaaagttgtatacttttgt

SEQ ID NO: 65845 - DNA, 40 bp, Homo sapiens
acaaaagtatacaactttaaatatgtaaattttttaaaat

SEQ ID NO: 65846 - DNA, 40 bp, Homo sapiens
ttttaaaaaatttacatatttaaagttgtatacttttgtt

SEQ ID NO: 65847 - DNA, 40 bp, Homo sapiens
aacaaaagtatacaactttaaatatgtaaattttttaaaa

SEQ ID NO: 65848 - DNA, 40 bp, Homo sapiens
tttaaaaaatttacatatttaaagttgtatacttttgttc

SEQ ID NO: 65849 - DNA, 40 bp, Homo sapiens
gaacaaaagtatacaactttaaatatgtaaattttttaaa

SEQ ID NO: 65850 - DNA, 40 bp, Homo sapiens
ttaaaaaatttacatatttaaagttgtatacttttgttcc

SEQ ID NO: 65851 - DNA, 40 bp, Homo sapiens
ggaacaaaagtatacaactttaaatatgtaaattttttaa

SEQ ID NO: 65852 - DNA, 40 bp, Homo sapiens
taaaaaatttacatatttaaagttgtatacttttgttcct

SEQ ID NO: 65853 - DNA, 40 bp, Homo sapiens
aggaacaaaagtatacaactttaaatatgtaaatttttta

SEQ ID NO: 65854 - DNA, 40 bp, Homo sapiens
aaaaaatttacatatttaaagttgtatacttttgttccta

SEQ ID NO: 65855 - DNA, 40 bp, Homo sapiens
taggaacaaaagtatacaactttaaatatgtaaatttttt

SEQ ID NO: 65856 - DNA, 40 bp, Homo sapiens
aaaaatttacatatttaaagttgtatacttttgttcctac

SEQ ID NO: 65857 - DNA, 40 bp, Homo sapiens
gtaggaacaaaagtatacaactttaaatatgtaaattttt

SEQ ID NO: 65858 - DNA, 40 bp, Homo sapiens
aaaatttacatatttaaagttgtatacttttgttcctacg

SEQ ID NO: 65859 - DNA, 40 bp, Homo sapiens
cgtaggaacaaaagtatacaactttaaatatgtaaatttt

SEQ ID NO: 65860 - DNA, 40 bp, Homo sapiens
aaatttacatatttaaagttgtatacttttgttcctacgt

SEQ ID NO: 65861 - DNA, 40 bp, Homo sapiens
acgtaggaacaaaagtatacaactttaaatatgtaaattt

SEQ ID NO: 65862 - DNA, 40 bp, Homo sapiens
aatttacatatttaaagttgtatacttttgttcctacgta

SEQ ID NO: 65863 - DNA, 40 bp, Homo sapiens
tacgtaggaacaaaagtatacaactttaaatatgtaaatt

SEQ ID NO: 65864 - DNA, 40 bp, Homo sapiens
atttacatatttaaagttgtatacttttgttcctacgtat

SEQ ID NO: 65865 - DNA, 40 bp, Homo sapiens
atacgtaggaacaaaagtatacaactttaaatatgtaaat

SEQ ID NO: 65866 - DNA, 40 bp, Homo sapiens
tttacatatttaaagttgtatacttttgttcctacgtatt

SEQ ID NO: 65867 - DNA, 40 bp, Homo sapiens
aatacgtaggaacaaaagtatacaactttaaatatgtaaa

SEQ ID NO: 65868 - DNA, 40 bp, Homo sapiens
ttacatatttaaagttgtatacttttgttcctacgtattt

SEQ ID NO: 65869 - DNA, 40 bp, Homo sapiens
aaatacgtaggaacaaaagtatacaactttaaatatgtaa

SEQ ID NO: 65870 - DNA, 40 bp, Homo sapiens
tacatatttaaagttgtatacttttgttcctacgtatttt

SEQ ID NO: 65871 - DNA, 40 bp, Homo sapiens
aaaatacgtaggaacaaaagtatacaactttaaatatgta

SEQ ID NO: 65872 - DNA, 40 bp, Homo sapiens
acatatttaaagttgtatacttttgttcctacgtattttc

SEQ ID NO: 65873 - DNA, 40 bp, Homo sapiens
gaaaatacgtaggaacaaaagtatacaactttaaatatgt

SEQ ID NO: 65874 - DNA, 40 bp, Homo sapiens
catatttaaagttgtatacttttgttcctacgtattttca

SEQ ID NO: 65875 - DNA, 40 bp, Homo sapiens
tgaaaatacgtaggaacaaaagtatacaactttaaatatg

SEQ ID NO: 65876 - DNA, 40 bp, Homo sapiens
atatttaaagttgtatacttttgttcctacgtattttcag

SEQ ID NO: 65877 - DNA, 40 bp, Homo sapiens
ctgaaaatacgtaggaacaaaagtatacaactttaaatat

SEQ ID NO: 65878 - DNA, 40 bp, Homo sapiens
tatttaaagttgtatacttttgttcctacgtattttcagt

SEQ ID NO: 65879 - DNA, 40 bp, Homo sapiens
actgaaaatacgtaggaacaaaagtatacaactttaaata

SEQ ID NO: 65880 - DNA, 40 bp, Homo sapiens
atttaaagttgtatacttttgttcctacgtattttcagtt

SEQ ID NO: 65881 - DNA, 40 bp, Homo sapiens
aactgaaaatacgtaggaacaaaagtatacaactttaaat

SEQ ID NO: 65882 - DNA, 40 bp, Homo sapiens
tttaaagttgtatacttttgttcctacgtattttcagttg

SEQ ID NO: 65883 - DNA, 40 bp, Homo sapiens
caactgaaaatacgtaggaacaaaagtatacaactttaaa

SEQ ID NO: 65884 - DNA, 40 bp, Homo sapiens
ttaaagttgtatacttttgttcctacgtattttcagttgt

SEQ ID NO: 65885 - DNA, 40 bp, Homo sapiens
acaactgaaaatacgtaggaacaaaagtatacaactttaa

SEQ ID NO: 65886 - DNA, 40 bp, Homo sapiens
taaagttgtatacttttgttcctacgtattttcagttgtt

SEQ ID NO: 65887 - DNA, 40 bp, Homo sapiens
aacaactgaaaatacgtaggaacaaaagtatacaacttta

SEQ ID NO: 65888 - DNA, 40 bp, Homo sapiens
aaagttgtatacttttgttcctacgtattttcagttgttc

SEQ ID NO: 65889 - DNA, 40 bp, Homo sapiens
gaacaactgaaaatacgtaggaacaaaagtatacaacttt

SEQ ID NO: 65890 - DNA, 40 bp, Homo sapiens
aagttgtatacttttgttcctacgtattttcagttgttct

SEQ ID NO: 65891 - DNA, 40 bp, Homo sapiens
agaacaactgaaaatacgtaggaacaaaagtatacaactt

SEQ ID NO: 65892 - DNA, 40 bp, Homo sapiens
agttgtatacttttgttcctacgtattttcagttgttctt

SEQ ID NO: 65893 - DNA, 40 bp, Homo sapiens
aagaacaactgaaaatacgtaggaacaaaagtatacaact

SEQ ID NO: 65894 - DNA, 40 bp, Homo sapiens
gttgtatacttttgttcctacgtattttcagttgttctta

SEQ ID NO: 65895 - DNA, 40 bp, Homo sapiens
taagaacaactgaaaatacgtaggaacaaaagtatacaac

SEQ ID NO: 65896 - DNA, 40 bp, Homo sapiens
ttgtatacttttgttcctacgtattttcagttgttcttaa

SEQ ID NO: 65897 - DNA, 40 bp, Homo sapiens
ttaagaacaactgaaaatacgtaggaacaaaagtatacaa

SEQ ID NO: 65898 - DNA, 40 bp, Homo sapiens
tgtatacttttgttcctacgtattttcagttgttcttaaa

SEQ ID NO: 65899 - DNA, 40 bp, Homo sapiens
tttaagaacaactgaaaatacgtaggaacaaaagtataca

SEQ ID NO: 65900 - DNA, 40 bp, Homo sapiens
gtatacttttgttcctacgtattttcagttgttcttaaag

SEQ ID NO: 65901 - DNA, 40 bp, Homo sapiens
ctttaagaacaactgaaaatacgtaggaacaaaagtatac

SEQ ID NO: 65902 - DNA, 40 bp, Homo sapiens
tatacttttgttcctacgtattttcagttgttcttaaagt

SEQ ID NO: 65903 - DNA, 40 bp, Homo sapiens
actttaagaacaactgaaaatacgtaggaacaaaagtata

SEQ ID NO: 65904 - DNA, 40 bp, Homo sapiens
atacttttgttcctacgtattttcagttgttcttaaagtt

SEQ ID NO: 65905 - DNA, 40 bp, Homo sapiens
aactttaagaacaactgaaaatacgtaggaacaaaagtat

SEQ ID NO: 65906 - DNA, 40 bp, Homo sapiens
tacttttgttcctacgtattttcagttgttcttaaagttt

SEQ ID NO: 65907 - DNA, 40 bp, Homo sapiens
aaactttaagaacaactgaaaatacgtaggaacaaaagta

SEQ ID NO: 65908 - DNA, 40 bp, Homo sapiens
acttttgttcctacgtattttcagttgttcttaaagttta

SEQ ID NO: 65909 - DNA, 40 bp, Homo sapiens
taaactttaagaacaactgaaaatacgtaggaacaaaagt

SEQ ID NO: 65910 - DNA, 40 bp, Homo sapiens
cttttgttcctacgtattttcagttgttcttaaagtttaa

SEQ ID NO: 65911 - DNA, 40 bp, Homo sapiens
ttaaactttaagaacaactgaaaatacgtaggaacaaaag

SEQ ID NO: 65912 - DNA, 40 bp, Homo sapiens
ttttgttcctacgtattttcagttgttcttaaagtttaat

SEQ ID NO: 65913 - DNA, 40 bp, Homo sapiens
attaaactttaagaacaactgaaaatacgtaggaacaaaa

SEQ ID NO: 65914 - DNA, 40 bp, Homo sapiens
tttgttcctacgtattttcagttgttcttaaagtttaata

SEQ ID NO: 65915 - DNA, 40 bp, Homo sapiens
tattaaactttaagaacaactgaaaatacgtaggaacaaa

SEQ ID NO: 65916 - DNA, 40 bp, Homo sapiens
ttgttcctacgtattttcagttgttcttaaagtttaataa

SEQ ID NO: 65917 - DNA, 40 bp, Homo sapiens
ttattaaactttaagaacaactgaaaatacgtaggaacaa

SEQ ID NO: 65918 - DNA, 40 bp, Homo sapiens
tgttcctacgtattttcagttgttcttaaagtttaataag

SEQ ID NO: 65919 - DNA, 40 bp, Homo sapiens
cttattaaactttaagaacaactgaaaatacgtaggaaca

SEQ ID NO: 65920 - DNA, 40 bp, Homo sapiens
gttcctacgtattttcagttgttcttaaagtttaataagt

SEQ ID NO: 65921 - DNA, 40 bp, Homo sapiens
acttattaaactttaagaacaactgaaaatacgtaggaac

SEQ ID NO: 65922 - DNA, 40 bp, Homo sapiens
ttcctacgtattttcagttgttcttaaagtttaataagtg

SEQ ID NO: 65923 - DNA, 40 bp, Homo sapiens
cacttattaaactttaagaacaactgaaaatacgtaggaa

SEQ ID NO: 65924 - DNA, 40 bp, Homo sapiens
tcctacgtattttcagttgttcttaaagtttaataagtga

SEQ ID NO: 65925 - DNA, 40 bp, Homo sapiens
tcacttattaaactttaagaacaactgaaaatacgtagga

SEQ ID NO: 65926 - DNA, 40 bp, Homo sapiens
cctacgtattttcagttgttcttaaagtttaataagtgac

SEQ ID NO: 65927 - DNA, 40 bp, Homo sapiens
gtcacttattaaactttaagaacaactgaaaatacgtagg

SEQ ID NO: 65928 - DNA, 40 bp, Homo sapiens
ctacgtattttcagttgttcttaaagtttaataagtgaca

SEQ ID NO: 65929 - DNA, 40 bp, Homo sapiens
tgtcacttattaaactttaagaacaactgaaaatacgtag

SEQ ID NO: 65930 - DNA, 40 bp, Homo sapiens
tacgtattttcagttgttcttaaagtttaataagtgacat

SEQ ID NO: 65931 - DNA, 40 bp, Homo sapiens
atgtcacttattaaactttaagaacaactgaaaatacgta

SEQ ID NO: 65932 - DNA, 40 bp, Homo sapiens
acgtattttcagttgttcttaaagtttaataagtgacatt

SEQ ID NO: 65933 - DNA, 40 bp, Homo sapiens
aatgtcacttattaaactttaagaacaactgaaaatacgt

SEQ ID NO: 65934 - DNA, 40 bp, Homo sapiens
cgtattttcagttgttcttaaagtttaataagtgacattt

SEQ ID NO: 65935 - DNA, 40 bp, Homo sapiens
aaatgtcacttattaaactttaagaacaactgaaaatacg

SEQ ID NO: 65936 - DNA, 40 bp, Homo sapiens
gtattttcagttgttcttaaagtttaataagtgacatttg

SEQ ID NO: 65937 - DNA, 40 bp, Homo sapiens
caaatgtcacttattaaactttaagaacaactgaaaatac

SEQ ID NO: 65938 - DNA, 40 bp, Homo sapiens
tattttcagttgttcttaaagtttaataagtgacatttga

SEQ ID NO: 65939 - DNA, 40 bp, Homo sapiens
tcaaatgtcacttattaaactttaagaacaactgaaaata

SEQ ID NO: 65940 - DNA, 40 bp, Homo sapiens
attttcagttgttcttaaagtttaataagtgacatttgaa

SEQ ID NO: 65941 - DNA, 40 bp, Homo sapiens
ttcaaatgtcacttattaaactttaagaacaactgaaaat

SEQ ID NO: 65942 - DNA, 40 bp, Homo sapiens
ttttcagttgttcttaaagtttaataagtgacatttgaaa

SEQ ID NO: 65943 - DNA, 40 bp, Homo sapiens
tttcaaatgtcacttattaaactttaagaacaactgaaaa

SEQ ID NO: 65944 - DNA, 40 bp, Homo sapiens
tttcagttgttcttaaagtttaataagtgacatttgaaaa

SEQ ID NO: 65945 - DNA, 40 bp, Homo sapiens
ttttcaaatgtcacttattaaactttaagaacaactgaaa

SEQ ID NO: 65946 - DNA, 40 bp, Homo sapiens
ttcagttgttcttaaagtttaataagtgacatttgaaaat

SEQ ID NO: 65947 - DNA, 40 bp, Homo sapiens
attttcaaatgtcacttattaaactttaagaacaactgaa

SEQ ID NO: 65948 - DNA, 40 bp, Homo sapiens
tcagttgttcttaaagtttaataagtgacatttgaaaatg

SEQ ID NO: 65949 - DNA, 40 bp, Homo sapiens
cattttcaaatgtcacttattaaactttaagaacaactga

SEQ ID NO: 65950 - DNA, 40 bp, Homo sapiens
cagttgttcttaaagtttaataagtgacatttgaaaatga

SEQ ID NO: 65951 - DNA, 40 bp, Homo sapiens
tcattttcaaatgtcacttattaaactttaagaacaactg

SEQ ID NO: 65952 - DNA, 40 bp, Homo sapiens
agttgttcttaaagtttaataagtgacatttgaaaatgag

SEQ ID NO: 65953 - DNA, 40 bp, Homo sapiens
ctcattttcaaatgtcacttattaaactttaagaacaact

SEQ ID NO: 65954 - DNA, 40 bp, Homo sapiens
gttgttcttaaagtttaataagtgacatttgaaaatgagt

SEQ ID NO: 65955 - DNA, 40 bp, Homo sapiens
actcattttcaaatgtcacttattaaactttaagaacaac

SEQ ID NO: 65956 - DNA, 40 bp, Homo sapiens
ttgttcttaaagtttaataagtgacatttgaaaatgagta

SEQ ID NO: 65957 - DNA, 40 bp, Homo sapiens
tactcattttcaaatgtcacttattaaactttaagaacaa

SEQ ID NO: 65958 - DNA, 40 bp, Homo sapiens
tgttcttaaagtttaataagtgacatttgaaaatgagtat

SEQ ID NO: 65959 - DNA, 40 bp, Homo sapiens
atactcattttcaaatgtcacttattaaactttaagaaca

SEQ ID NO: 65960 - DNA, 40 bp, Homo sapiens
gttcttaaagtttaataagtgacatttgaaaatgagtata

SEQ ID NO: 65961 - DNA, 40 bp, Homo sapiens
tatactcattttcaaatgtcacttattaaactttaagaac

SEQ ID NO: 65962 - DNA, 40 bp, Homo sapiens
ttcttaaagtttaataagtgacatttgaaaatgagtatat

SEQ ID NO: 65963 - DNA, 40 bp, Homo sapiens
atatactcattttcaaatgtcacttattaaactttaagaa

SEQ ID NO: 65964 - DNA, 40 bp, Homo sapiens
tcttaaagtttaataagtgacatttgaaaatgagtatatg

SEQ ID NO: 65965 - DNA, 40 bp, Homo sapiens
catatactcattttcaaatgtcacttattaaactttaaga

SEQ ID NO: 65966 - DNA, 40 bp, Homo sapiens
cttaaagtttaataagtgacatttgaaaatgagtatatgt

SEQ ID NO: 65967 - DNA, 40 bp, Homo sapiens
acatatactcattttcaaatgtcacttattaaactttaag

SEQ ID NO: 65968 - DNA, 40 bp, Homo sapiens
ttaaagtttaataagtgacatttgaaaatgagtatatgtg

SEQ ID NO: 65969 - DNA, 40 bp, Homo sapiens
cacatatactcattttcaaatgtcacttattaaactttaa

SEQ ID NO: 65970 - DNA, 40 bp, Homo sapiens
taaagtttaataagtgacatttgaaaatgagtatatgtgt

SEQ ID NO: 65971 - DNA, 40 bp, Homo sapiens
acacatatactcattttcaaatgtcacttattaaacttta

SEQ ID NO: 65972 - DNA, 40 bp, Homo sapiens
aaagtttaataagtgacatttgaaaatgagtatatgtgta

SEQ ID NO: 65973 - DNA, 40 bp, Homo sapiens
tacacatatactcattttcaaatgtcacttattaaacttt

SEQ ID NO: 65974 - DNA, 40 bp, Homo sapiens
aagtttaataagtgacatttgaaaatgagtatatgtgtat

SEQ ID NO: 65975 - DNA, 40 bp, Homo sapiens
atacacatatactcattttcaaatgtcacttattaaactt

SEQ ID NO: 65976 - DNA, 40 bp, Homo sapiens
agtttaataagtgacatttgaaaatgagtatatgtgtata

SEQ ID NO: 65977 - DNA, 40 bp, Homo sapiens
tatacacatatactcattttcaaatgtcacttattaaact

SEQ ID NO: 65978 - DNA, 40 bp, Homo sapiens
gtttaataagtgacatttgaaaatgagtatatgtgtataa

SEQ ID NO: 65979 - DNA, 40 bp, Homo sapiens
ttatacacatatactcattttcaaatgtcacttattaaac

SEQ ID NO: 65980 - DNA, 40 bp, Homo sapiens
tttaataagtgacatttgaaaatgagtatatgtgtataaa

SEQ ID NO: 65981 - DNA, 40 bp, Homo sapiens
tttatacacatatactcattttcaaatgtcacttattaaa

SEQ ID NO: 65982 - DNA, 40 bp, Homo sapiens
ttaataagtgacatttgaaaatgagtatatgtgtataaaa

SEQ ID NO: 65983 - DNA, 40 bp, Homo sapiens
ttttatacacatatactcattttcaaatgtcacttattaa

SEQ ID NO: 65984 - DNA, 40 bp, Homo sapiens
taataagtgacatttgaaaatgagtatatgtgtataaaaa

SEQ ID NO: 65985 - DNA, 40 bp, Homo sapiens
tttttatacacatatactcattttcaaatgtcacttatta

SEQ ID NO: 65986 - DNA, 40 bp, Homo sapiens
aataagtgacatttgaaaatgagtatatgtgtataaaaac

SEQ ID NO: 65987 - DNA, 40 bp, Homo sapiens
gtttttatacacatatactcattttcaaatgtcacttatt

SEQ ID NO: 65988 - DNA, 40 bp, Homo sapiens
ataagtgacatttgaaaatgagtatatgtgtataaaaaca

SEQ ID NO: 65989 - DNA, 40 bp, Homo sapiens
tgtttttatacacatatactcattttcaaatgtcacttat

SEQ ID NO: 65990 - DNA, 40 bp, Homo sapiens
taagtgacatttgaaaatgagtatatgtgtataaaaacaa

SEQ ID NO: 65991 - DNA, 40 bp, Homo sapiens
ttgtttttatacacatatactcattttcaaatgtcactta

SEQ ID NO: 65992 - DNA, 40 bp, Homo sapiens
aagtgacatttgaaaatgagtatatgtgtataaaaacaaa

SEQ ID NO: 65993 - DNA, 40 bp, Homo sapiens
tttgtttttatacacatatactcattttcaaatgtcactt

SEQ ID NO: 65994 - DNA, 40 bp, Homo sapiens
agtgacatttgaaaatgagtatatgtgtataaaaacaaaa

SEQ ID NO: 65995 - DNA, 40 bp, Homo sapiens
ttttgtttttatacacatatactcattttcaaatgtcact

SEQ ID NO: 65996 - DNA, 40 bp, Homo sapiens
gtgacatttgaaaatgagtatatgtgtataaaaacaaaag

SEQ ID NO: 65997 - DNA, 40 bp, Homo sapiens
cttttgtttttatacacatatactcattttcaaatgtcac

SEQ ID NO: 65998 - DNA, 40 bp, Homo sapiens
tgacatttgaaaatgagtatatgtgtataaaaacaaaagt

SEQ ID NO: 65999 - DNA, 40 bp, Homo sapiens
acttttgtttttatacacatatactcattttcaaatgtca

SEQ ID NO: 66000 - DNA, 40 bp, Homo sapiens
gacatttgaaaatgagtatatgtgtataaaaacaaaagta

SEQ ID NO: 66001 - DNA, 40 bp, Homo sapiens
tacttttgtttttatacacatatactcattttcaaatgtc

SEQ ID NO: 66002 - DNA, 40 bp, Homo sapiens
acatttgaaaatgagtatatgtgtataaaaacaaaagtag

SEQ ID NO: 66003 - DNA, 40 bp, Homo sapiens
ctacttttgtttttatacacatatactcattttcaaatgt

SEQ ID NO: 66004 - DNA, 40 bp, Homo sapiens
catttgaaaatgagtatatgtgtataaaaacaaaagtagg

SEQ ID NO: 66005 - DNA, 40 bp, Homo sapiens
cctacttttgtttttatacacatatactcattttcaaatg

SEQ ID NO: 66006 - DNA, 40 bp, Homo sapiens
atttgaaaatgagtatatgtgtataaaaacaaaagtaggc

SEQ ID NO: 66007 - DNA, 40 bp, Homo sapiens
gcctacttttgtttttatacacatatactcattttcaaat

SEQ ID NO: 66008 - DNA, 40 bp, Homo sapiens
tttgaaaatgagtatatgtgtataaaaacaaaagtaggct

SEQ ID NO: 66009 - DNA, 40 bp, Homo sapiens
agcctacttttgtttttatacacatatactcattttcaaa

SEQ ID NO: 66010 - DNA, 40 bp, Homo sapiens
ttgaaaatgagtatatgtgtataaaaacaaaagtaggcta

SEQ ID NO: 66011 - DNA, 40 bp, Homo sapiens
tagcctacttttgtttttatacacatatactcattttcaa

SEQ ID NO: 66012 - DNA, 40 bp, Homo sapiens
tgaaaatgagtatatgtgtataaaaacaaaagtaggctag

SEQ ID NO: 66013 - DNA, 40 bp, Homo sapiens
ctagcctacttttgtttttatacacatatactcattttca

SEQ ID NO: 66014 - DNA, 40 bp, Homo sapiens
gaaaatgagtatatgtgtataaaaacaaaagtaggctagg

SEQ ID NO: 66015 - DNA, 40 bp, Homo sapiens
cctagcctacttttgtttttatacacatatactcattttc

SEQ ID NO: 66016 - DNA, 40 bp, Homo sapiens
aaaatgagtatatgtgtataaaaacaaaagtaggctaggc

SEQ ID NO: 66017 - DNA, 40 bp, Homo sapiens
gcctagcctacttttgtttttatacacatatactcatttt

SEQ ID NO: 66018 - DNA, 40 bp, Homo sapiens
aaatgagtatatgtgtataaaaacaaaagtaggctaggca

SEQ ID NO: 66019 - DNA, 40 bp, Homo sapiens
tgcctagcctacttttgtttttatacacatatactcattt

SEQ ID NO: 66020 - DNA, 40 bp, Homo sapiens
aatgagtatatgtgtataaaaacaaaagtaggctaggcac

SEQ ID NO: 66021 - DNA, 40 bp, Homo sapiens
gtgcctagcctacttttgtttttatacacatatactcatt

SEQ ID NO: 66022 - DNA, 40 bp, Homo sapiens
atgagtatatgtgtataaaaacaaaagtaggctaggcacg

SEQ ID NO: 66023 - DNA, 40 bp, Homo sapiens
cgtgcctagcctacttttgtttttatacacatatactcat

SEQ ID NO: 66024 - DNA, 40 bp, Homo sapiens
tgagtatatgtgtataaaaacaaaagtaggctaggcacgg

SEQ ID NO: 66025 - DNA, 40 bp, Homo sapiens
ccgtgcctagcctacttttgtttttatacacatatactca

SEQ ID NO: 66026 - DNA, 40 bp, Homo sapiens
gagtatatgtgtataaaaacaaaagtaggctaggcacggt

SEQ ID NO: 66027 - DNA, 40 bp, Homo sapiens
accgtgcctagcctacttttgtttttatacacatatactc

SEQ ID NO: 66028 - DNA, 40 bp, Homo sapiens
agtatatgtgtataaaaacaaaagtaggctaggcacggtg

SEQ ID NO: 66029 - DNA, 40 bp, Homo sapiens
caccgtgcctagcctacttttgtttttatacacatatact

SEQ ID NO: 66030 - DNA, 40 bp, Homo sapiens
gtatatgtgtataaaaacaaaagtaggctaggcacggtgg

SEQ ID NO: 66031 - DNA, 40 bp, Homo sapiens
ccaccgtgcctagcctacttttgtttttatacacatatac

SEQ ID NO: 66032 - DNA, 40 bp, Homo sapiens
tatatgtgtataaaaacaaaagtaggctaggcacggtggc

SEQ ID NO: 66033 - DNA, 40 bp, Homo sapiens
gccaccgtgcctagcctacttttgtttttatacacatata

SEQ ID NO: 66034 - DNA, 40 bp, Homo sapiens
atatgtgtataaaaacaaaagtaggctaggcacggtggct

SEQ ID NO: 66035 - DNA, 40 bp, Homo sapiens
agccaccgtgcctagcctacttttgtttttatacacatat

SEQ ID NO: 66036 - DNA, 40 bp, Homo sapiens
tatgtgtataaaaacaaaagtaggctaggcacggtggctc

SEQ ID NO: 66037 - DNA, 40 bp, Homo sapiens
gagccaccgtgcctagcctacttttgtttttatacacata

SEQ ID NO: 66038 - DNA, 40 bp, Homo sapiens
atgtgtataaaaacaaaagtaggctaggcacggtggctca

SEQ ID NO: 66039 - DNA, 40 bp, Homo sapiens
tgagccaccgtgcctagcctacttttgtttttatacacat

SEQ ID NO: 66040 - DNA, 40 bp, Homo sapiens
tgtgtataaaaacaaaagtaggctaggcacggtggctcat

SEQ ID NO: 66041 - DNA, 40 bp, Homo sapiens
atgagccaccgtgcctagcctacttttgtttttatacaca

SEQ ID NO: 66042 - DNA, 40 bp, Homo sapiens
gtgtataaaaacaaaagtaggctaggcacggtggctcatg

SEQ ID NO: 66043 - DNA, 40 bp, Homo sapiens
catgagccaccgtgcctagcctacttttgtttttatacac

SEQ ID NO: 66044 - DNA, 40 bp, Homo sapiens
tgtataaaaacaaaagtaggctaggcacggtggctcatgc

SEQ ID NO: 66045 - DNA, 40 bp, Homo sapiens
gcatgagccaccgtgcctagcctacttttgtttttataca

SEQ ID NO: 66046 - DNA, 40 bp, Homo sapiens
gtataaaaacaaaagtaggctaggcacggtggctcatgcc

SEQ ID NO: 66047 - DNA, 40 bp, Homo sapiens
ggcatgagccaccgtgcctagcctacttttgtttttatac

SEQ ID NO: 66048 - DNA, 40 bp, Homo sapiens
tataaaaacaaaagtaggctaggcacggtggctcatgcct

SEQ ID NO: 66049 - DNA, 40 bp, Homo sapiens
aggcatgagccaccgtgcctagcctacttttgtttttata

SEQ ID NO: 66050 - DNA, 40 bp, Homo sapiens
ataaaaacaaaagtaggctaggcacggtggctcatgccta

SEQ ID NO: 66051 - DNA, 40 bp, Homo sapiens
taggcatgagccaccgtgcctagcctacttttgtttttat

SEQ ID NO: 66052 - DNA, 40 bp, Homo sapiens
taaaaacaaaagtaggctaggcacggtggctcatgcctat

SEQ ID NO: 66053 - DNA, 40 bp, Homo sapiens
ataggcatgagccaccgtgcctagcctacttttgttttta

SEQ ID NO: 66054 - DNA, 40 bp, Homo sapiens
aaaaacaaaagtaggctaggcacggtggctcatgcctata

SEQ ID NO: 66055 - DNA, 40 bp, Homo sapiens
tataggcatgagccaccgtgcctagcctacttttgttttt

SEQ ID NO: 66056 - DNA, 40 bp, Homo sapiens
aaaacaaaagtaggctaggcacggtggctcatgcctataa

SEQ ID NO: 66057 - DNA, 40 bp, Homo sapiens
ttataggcatgagccaccgtgcctagcctacttttgtttt

SEQ ID NO: 66058 - DNA, 40 bp, Homo sapiens
aaacaaaagtaggctaggcacggtggctcatgcctataat

SEQ ID NO: 66059 - DNA, 40 bp, Homo sapiens
attataggcatgagccaccgtgcctagcctacttttgttt

SEQ ID NO: 66060 - DNA, 40 bp, Homo sapiens
aacaaaagtaggctaggcacggtggctcatgcctataatc

SEQ ID NO: 66061 - DNA, 40 bp, Homo sapiens
gattataggcatgagccaccgtgcctagcctacttttgtt

SEQ ID NO: 66062 - DNA, 40 bp, Homo sapiens
acaaaagtaggctaggcacggtggctcatgcctataatcc

SEQ ID NO: 66063 - DNA, 40 bp, Homo sapiens
ggattataggcatgagccaccgtgcctagcctacttttgt

SEQ ID NO: 66064 - DNA, 40 bp, Homo sapiens
caaaagtaggctaggcacggtggctcatgcctataatcct

SEQ ID NO: 66065 - DNA, 40 bp, Homo sapiens
aggattataggcatgagccaccgtgcctagcctacttttg

SEQ ID NO: 66066 - DNA, 40 bp, Homo sapiens
aaaagtaggctaggcacggtggctcatgcctataatccta

SEQ ID NO: 66067 - DNA, 40 bp, Homo sapiens
taggattataggcatgagccaccgtgcctagcctactttt

SEQ ID NO: 66068 - DNA, 40 bp, Homo sapiens
aaagtaggctaggcacggtggctcatgcctataatcctag

SEQ ID NO: 66069 - DNA, 40 bp, Homo sapiens
ctaggattataggcatgagccaccgtgcctagcctacttt

SEQ ID NO: 66070 - DNA, 40 bp, Homo sapiens
aagtaggctaggcacggtggctcatgcctataatcctagc

SEQ ID NO: 66071 - DNA, 40 bp, Homo sapiens
gctaggattataggcatgagccaccgtgcctagcctactt

SEQ ID NO: 66072 - DNA, 40 bp, Homo sapiens
agtaggctaggcacggtggctcatgcctataatcctagca

SEQ ID NO: 66073 - DNA, 40 bp, Homo sapiens
tgctaggattataggcatgagccaccgtgcctagcctact

SEQ ID NO: 66074 - DNA, 40 bp, Homo sapiens
gtaggctaggcacggtggctcatgcctataatcctagcac

SEQ ID NO: 66075 - DNA, 40 bp, Homo sapiens
gtgctaggattataggcatgagccaccgtgcctagcctac

SEQ ID NO: 66076 - DNA, 40 bp, Homo sapiens
taggctaggcacggtggctcatgcctataatcctagcact

SEQ ID NO: 66077 - DNA, 40 bp, Homo sapiens
agtgctaggattataggcatgagccaccgtgcctagccta

SEQ ID NO: 66078 - DNA, 40 bp, Homo sapiens
aggctaggcacggtggctcatgcctataatcctagcactt

SEQ ID NO: 66079 - DNA, 40 bp, Homo sapiens
aagtgctaggattataggcatgagccaccgtgcctagcct

SEQ ID NO: 66080 - DNA, 40 bp, Homo sapiens
ggctaggcacggtggctcatgcctataatcctagcacttt

SEQ ID NO: 66081 - DNA, 40 bp, Homo sapiens
aaagtgctaggattataggcatgagccaccgtgcctagcc

SEQ ID NO: 66082 - DNA, 40 bp, Homo sapiens
gctaggcacggtggctcatgcctataatcctagcactttg

SEQ ID NO: 66083 - DNA, 40 bp, Homo sapiens
caaagtgctaggattataggcatgagccaccgtgcctagc

SEQ ID NO: 66084 - DNA, 40 bp, Homo sapiens
ctaggcacggtggctcatgcctataatcctagcactttgg

SEQ ID NO: 66085 - DNA, 40 bp, Homo sapiens
ccaaagtgctaggattataggcatgagccaccgtgcctag

SEQ ID NO: 66086 - DNA, 40 bp, Homo sapiens
taggcacggtggctcatgcctataatcctagcactttggg

SEQ ID NO: 66087 - DNA, 40 bp, Homo sapiens
cccaaagtgctaggattataggcatgagccaccgtgccta

SEQ ID NO: 66088 - DNA, 40 bp, Homo sapiens
aggcacggtggctcatgcctataatcctagcactttggga

SEQ ID NO: 66089 - DNA, 40 bp, Homo sapiens
tcccaaagtgctaggattataggcatgagccaccgtgcct

SEQ ID NO: 66090 - DNA, 40 bp, Homo sapiens
ggcacggtggctcatgcctataatcctagcactttgggag

SEQ ID NO: 66091 - DNA, 40 bp, Homo sapiens
ctcccaaagtgctaggattataggcatgagccaccgtgcc

SEQ ID NO: 66092 - DNA, 40 bp, Homo sapiens
gcacggtggctcatgcctataatcctagcactttgggagg

SEQ ID NO: 66093 - DNA, 40 bp, Homo sapiens
cctcccaaagtgctaggattataggcatgagccaccgtgc

SEQ ID NO: 66094 - DNA, 40 bp, Homo sapiens
cacggtggctcatgcctataatcctagcactttgggaggc

SEQ ID NO: 66095 - DNA, 40 bp, Homo sapiens
gcctcccaaagtgctaggattataggcatgagccaccgtg

SEQ ID NO: 66096 - DNA, 40 bp, Homo sapiens
acggtggctcatgcctataatcctagcactttgggaggct

SEQ ID NO: 66097 - DNA, 40 bp, Homo sapiens
agcctcccaaagtgctaggattataggcatgagccaccgt

SEQ ID NO: 66098 - DNA, 40 bp, Homo sapiens
cggtggctcatgcctataatcctagcactttgggaggctg

SEQ ID NO: 66099 - DNA, 40 bp, Homo sapiens
cagcctcccaaagtgctaggattataggcatgagccaccg

SEQ ID NO: 66100 - DNA, 40 bp, Homo sapiens
ggtggctcatgcctataatcctagcactttgggaggctga

SEQ ID NO: 66101 - DNA, 40 bp, Homo sapiens
tcagcctcccaaagtgctaggattataggcatgagccacc

SEQ ID NO: 66102 - DNA, 40 bp, Homo sapiens
gtggctcatgcctataatcctagcactttgggaggctgag

SEQ ID NO: 66103 - DNA, 40 bp, Homo sapiens
ctcagcctcccaaagtgctaggattataggcatgagccac

SEQ ID NO: 66104 - DNA, 40 bp, Homo sapiens
tggctcatgcctataatcctagcactttgggaggctgagg

SEQ ID NO: 66105 - DNA, 40 bp, Homo sapiens
cctcagcctcccaaagtgctaggattataggcatgagcca

SEQ ID NO: 66106 - DNA, 40 bp, Homo sapiens
ggctcatgcctataatcctagcactttgggaggctgaggc

SEQ ID NO: 66107 - DNA, 40 bp, Homo sapiens
gcctcagcctcccaaagtgctaggattataggcatgagcc

SEQ ID NO: 66108 - DNA, 40 bp, Homo sapiens
gctcatgcctataatcctagcactttgggaggctgaggca

SEQ ID NO: 66109 - DNA, 40 bp, Homo sapiens
tgcctcagcctcccaaagtgctaggattataggcatgagc

SEQ ID NO: 66110 - DNA, 40 bp, Homo sapiens
ctcatgcctataatcctagcactttgggaggctgaggcag

SEQ ID NO: 66111 - DNA, 40 bp, Homo sapiens
ctgcctcagcctcccaaagtgctaggattataggcatgag

SEQ ID NO: 66112 - DNA, 40 bp, Homo sapiens
tcatgcctataatcctagcactttgggaggctgaggcagg

SEQ ID NO: 66113 - DNA, 40 bp, Homo sapiens
cctgcctcagcctcccaaagtgctaggattataggcatga

SEQ ID NO: 66114 - DNA, 40 bp, Homo sapiens
catgcctataatcctagcactttgggaggctgaggcaggc

SEQ ID NO: 66115 - DNA, 40 bp, Homo sapiens
gcctgcctcagcctcccaaagtgctaggattataggcatg

SEQ ID NO: 66116 - DNA, 40 bp, Homo sapiens
atgcctataatcctagcactttgggaggctgaggcaggcg

SEQ ID NO: 66117 - DNA, 40 bp, Homo sapiens
cgcctgcctcagcctcccaaagtgctaggattataggcat

SEQ ID NO: 66118 - DNA, 40 bp, Homo sapiens
tgcctataatcctagcactttgggaggctgaggcaggcgg

SEQ ID NO: 66119 - DNA, 40 bp, Homo sapiens
ccgcctgcctcagcctcccaaagtgctaggattataggca

SEQ ID NO: 66120 - DNA, 40 bp, Homo sapiens
gcctataatcctagcactttgggaggctgaggcaggcgga

SEQ ID NO: 66121 - DNA, 40 bp, Homo sapiens
tccgcctgcctcagcctcccaaagtgctaggattataggc

SEQ ID NO: 66122 - DNA, 40 bp, Homo sapiens
cctataatcctagcactttgggaggctgaggcaggcggat

SEQ ID NO: 66123 - DNA, 40 bp, Homo sapiens
atccgcctgcctcagcctcccaaagtgctaggattatagg

SEQ ID NO: 66124 - DNA, 40 bp, Homo sapiens
ctataatcctagcactttgggaggctgaggcaggcggatc

SEQ ID NO: 66125 - DNA, 40 bp, Homo sapiens
gatccgcctgcctcagcctcccaaagtgctaggattatag

SEQ ID NO: 66126 - DNA, 40 bp, Homo sapiens
tataatcctagcactttgggaggctgaggcaggcggatca

SEQ ID NO: 66127 - DNA, 40 bp, Homo sapiens
tgatccgcctgcctcagcctcccaaagtgctaggattata

SEQ ID NO: 66128 - DNA, 40 bp, Homo sapiens
ataatcctagcactttgggaggctgaggcaggcggatcac

SEQ ID NO: 66129 - DNA, 40 bp, Homo sapiens
gtgatccgcctgcctcagcctcccaaagtgctaggattat

SEQ ID NO: 66130 - DNA, 40 bp, Homo sapiens
taatcctagcactttgggaggctgaggcaggcggatcaca

SEQ ID NO: 66131 - DNA, 40 bp, Homo sapiens
tgtgatccgcctgcctcagcctcccaaagtgctaggatta

SEQ ID NO: 66132 - DNA, 40 bp, Homo sapiens
aatcctagcactttgggaggctgaggcaggcggatcacaa

SEQ ID NO: 66133 - DNA, 40 bp, Homo sapiens
ttgtgatccgcctgcctcagcctcccaaagtgctaggatt

SEQ ID NO: 66134 - DNA, 40 bp, Homo sapiens
atcctagcactttgggaggctgaggcaggcggatcacaag

SEQ ID NO: 66135 - DNA, 40 bp, Homo sapiens
cttgtgatccgcctgcctcagcctcccaaagtgctaggat

SEQ ID NO: 66136 - DNA, 40 bp, Homo sapiens
tcctagcactttgggaggctgaggcaggcggatcacaagg

SEQ ID NO: 66137 - DNA, 40 bp, Homo sapiens
ccttgtgatccgcctgcctcagcctcccaaagtgctagga

SEQ ID NO: 66138 - DNA, 40 bp, Homo sapiens
cctagcactttgggaggctgaggcaggcggatcacaaggt

SEQ ID NO: 66139 - DNA, 40 bp, Homo sapiens
accttgtgatccgcctgcctcagcctcccaaagtgctagg

SEQ ID NO: 66140 - DNA, 40 bp, Homo sapiens
ctagcactttgggaggctgaggcaggcggatcacaaggtc

SEQ ID NO: 66141 - DNA, 40 bp, Homo sapiens
gaccttgtgatccgcctgcctcagcctcccaaagtgctag

SEQ ID NO: 66142 - DNA, 40 bp, Homo sapiens
tagcactttgggaggctgaggcaggcggatcacaaggtca

SEQ ID NO: 66143 - DNA, 40 bp, Homo sapiens
tgaccttgtgatccgcctgcctcagcctcccaaagtgcta

SEQ ID NO: 66144 - DNA, 40 bp, Homo sapiens
agcactttgggaggctgaggcaggcggatcacaaggtcag

SEQ ID NO: 66145 - DNA, 40 bp, Homo sapiens
ctgaccttgtgatccgcctgcctcagcctcccaaagtgct

SEQ ID NO: 66146 - DNA, 40 bp, Homo sapiens
gcactttgggaggctgaggcaggcggatcacaaggtcagg

SEQ ID NO: 66147 - DNA, 40 bp, Homo sapiens
cctgaccttgtgatccgcctgcctcagcctcccaaagtgc

SEQ ID NO: 66148 - DNA, 40 bp, Homo sapiens
cactttgggaggctgaggcaggcggatcacaaggtcagga

SEQ ID NO: 66149 - DNA, 40 bp, Homo sapiens
tcctgaccttgtgatccgcctgcctcagcctcccaaagtg

SEQ ID NO: 66150 - DNA, 40 bp, Homo sapiens
actttgggaggctgaggcaggcggatcacaaggtcaggag

SEQ ID NO: 66151 - DNA, 40 bp, Homo sapiens
ctcctgaccttgtgatccgcctgcctcagcctcccaaagt

SEQ ID NO: 66152 - DNA, 40 bp, Homo sapiens
ctttgggaggctgaggcaggcggatcacaaggtcaggagt

SEQ ID NO: 66153 - DNA, 40 bp, Homo sapiens
actcctgaccttgtgatccgcctgcctcagcctcccaaag

SEQ ID NO: 66154 - DNA, 40 bp, Homo sapiens
tttgggaggctgaggcaggcggatcacaaggtcaggagtt

SEQ ID NO: 66155 - DNA, 40 bp, Homo sapiens
aactcctgaccttgtgatccgcctgcctcagcctcccaaa

SEQ ID NO: 66156 - DNA, 40 bp, Homo sapiens
ttgggaggctgaggcaggcggatcacaaggtcaggagttt

SEQ ID NO: 66157 - DNA, 40 bp, Homo sapiens
aaactcctgaccttgtgatccgcctgcctcagcctcccaa

SEQ ID NO: 66158 - DNA, 40 bp, Homo sapiens
tgggaggctgaggcaggcggatcacaaggtcaggagtttg

SEQ ID NO: 66159 - DNA, 40 bp, Homo sapiens
caaactcctgaccttgtgatccgcctgcctcagcctccca

SEQ ID NO: 66160 - DNA, 40 bp, Homo sapiens
gggaggctgaggcaggcggatcacaaggtcaggagtttga

SEQ ID NO: 66161 - DNA, 40 bp, Homo sapiens
tcaaactcctgaccttgtgatccgcctgcctcagcctccc

SEQ ID NO: 66162 - DNA, 40 bp, Homo sapiens
ggaggctgaggcaggcggatcacaaggtcaggagtttgag

SEQ ID NO: 66163 - DNA, 40 bp, Homo sapiens
ctcaaactcctgaccttgtgatccgcctgcctcagcctcc

SEQ ID NO: 66164 - DNA, 40 bp, Homo sapiens
gaggctgaggcaggcggatcacaaggtcaggagtttgaga

SEQ ID NO: 66165 - DNA, 40 bp, Homo sapiens
tctcaaactcctgaccttgtgatccgcctgcctcagcctc

SEQ ID NO: 66166 - DNA, 40 bp, Homo sapiens
aggctgaggcaggcggatcacaaggtcaggagtttgagac

SEQ ID NO: 66167 - DNA, 40 bp, Homo sapiens
gtctcaaactcctgaccttgtgatccgcctgcctcagcct

SEQ ID NO: 66168 - DNA, 40 bp, Homo sapiens
ggctgaggcaggcggatcacaaggtcaggagtttgagacc

SEQ ID NO: 66169 - DNA, 40 bp, Homo sapiens
ggtctcaaactcctgaccttgtgatccgcctgcctcagcc

SEQ ID NO: 66170 - DNA, 40 bp, Homo sapiens
gctgaggcaggcggatcacaaggtcaggagtttgagacca

SEQ ID NO: 66171 - DNA, 40 bp, Homo sapiens
tggtctcaaactcctgaccttgtgatccgcctgcctcagc

SEQ ID NO: 66172 - DNA, 40 bp, Homo sapiens
ctgaggcaggcggatcacaaggtcaggagtttgagaccag

SEQ ID NO: 66173 - DNA, 40 bp, Homo sapiens
ctggtctcaaactcctgaccttgtgatccgcctgcctcag

SEQ ID NO: 66174 - DNA, 40 bp, Homo sapiens
tgaggcaggcggatcacaaggtcaggagtttgagaccagc

SEQ ID NO: 66175 - DNA, 40 bp, Homo sapiens
gctggtctcaaactcctgaccttgtgatccgcctgcctca

SEQ ID NO: 66176 - DNA, 40 bp, Homo sapiens
gaggcaggcggatcacaaggtcaggagtttgagaccagcc

SEQ ID NO: 66177 - DNA, 40 bp, Homo sapiens
ggctggtctcaaactcctgaccttgtgatccgcctgcctc

SEQ ID NO: 66178 - DNA, 40 bp, Homo sapiens
aggcaggcggatcacaaggtcaggagtttgagaccagcct

SEQ ID NO: 66179 - DNA, 40 bp, Homo sapiens
aggctggtctcaaactcctgaccttgtgatccgcctgcct

SEQ ID NO: 66180 - DNA, 40 bp, Homo sapiens
ggcaggcggatcacaaggtcaggagtttgagaccagcctg

SEQ ID NO: 66181 - DNA, 40 bp, Homo sapiens
caggctggtctcaaactcctgaccttgtgatccgcctgcc

SEQ ID NO: 66182 - DNA, 40 bp, Homo sapiens
gcaggcggatcacaaggtcaggagtttgagaccagcctgg

SEQ ID NO: 66183 - DNA, 40 bp, Homo sapiens
ccaggctggtctcaaactcctgaccttgtgatccgcctgc

SEQ ID NO: 66184 - DNA, 40 bp, Homo sapiens
caggcggatcacaaggtcaggagtttgagaccagcctggg

SEQ ID NO: 66185 - DNA, 40 bp, Homo sapiens
cccaggctggtctcaaactcctgaccttgtgatccgcctg

SEQ ID NO: 66186 - DNA, 40 bp, Homo sapiens
aggcggatcacaaggtcaggagtttgagaccagcctgggc

SEQ ID NO: 66187 - DNA, 40 bp, Homo sapiens
gcccaggctggtctcaaactcctgaccttgtgatccgcct

SEQ ID NO: 66188 - DNA, 40 bp, Homo sapiens
ggcggatcacaaggtcaggagtttgagaccagcctgggca

SEQ ID NO: 66189 - DNA, 40 bp, Homo sapiens
tgcccaggctggtctcaaactcctgaccttgtgatccgcc

SEQ ID NO: 66190 - DNA, 40 bp, Homo sapiens
gcggatcacaaggtcaggagtttgagaccagcctgggcaa

SEQ ID NO: 66191 - DNA, 40 bp, Homo sapiens
ttgcccaggctggtctcaaactcctgaccttgtgatccgc

SEQ ID NO: 66192 - DNA, 40 bp, Homo sapiens
cggatcacaaggtcaggagtttgagaccagcctgggcaat

SEQ ID NO: 66193 - DNA, 40 bp, Homo sapiens
attgcccaggctggtctcaaactcctgaccttgtgatccg

SEQ ID NO: 66194 - DNA, 40 bp, Homo sapiens
ggatcacaaggtcaggagtttgagaccagcctgggcaata

SEQ ID NO: 66195 - DNA, 40 bp, Homo sapiens
tattgcccaggctggtctcaaactcctgaccttgtgatcc

SEQ ID NO: 66196 - DNA, 40 bp, Homo sapiens
gatcacaaggtcaggagtttgagaccagcctgggcaatat

SEQ ID NO: 66197 - DNA, 40 bp, Homo sapiens
atattgcccaggctggtctcaaactcctgaccttgtgatc

SEQ ID NO: 66198 - DNA, 40 bp, Homo sapiens
atcacaaggtcaggagtttgagaccagcctgggcaatatg

SEQ ID NO: 66199 - DNA, 40 bp, Homo sapiens
catattgcccaggctggtctcaaactcctgaccttgtgat

SEQ ID NO: 66200 - DNA, 40 bp, Homo sapiens
tcacaaggtcaggagtttgagaccagcctgggcaatatgg

SEQ ID NO: 66201 - DNA, 40 bp, Homo sapiens
ccatattgcccaggctggtctcaaactcctgaccttgtga

SEQ ID NO: 66202 - DNA, 40 bp, Homo sapiens
cacaaggtcaggagtttgagaccagcctgggcaatatggt

SEQ ID NO: 66203 - DNA, 40 bp, Homo sapiens
accatattgcccaggctggtctcaaactcctgaccttgtg

SEQ ID NO: 66204 - DNA, 40 bp, Homo sapiens
acaaggtcaggagtttgagaccagcctgggcaatatggtg

SEQ ID NO: 66205 - DNA, 40 bp, Homo sapiens
caccatattgcccaggctggtctcaaactcctgaccttgt

SEQ ID NO: 66206 - DNA, 40 bp, Homo sapiens
caaggtcaggagtttgagaccagcctgggcaatatggtga

SEQ ID NO: 66207 - DNA, 40 bp, Homo sapiens
tcaccatattgcccaggctggtctcaaactcctgaccttg

SEQ ID NO: 66208 - DNA, 40 bp, Homo sapiens
aaggtcaggagtttgagaccagcctgggcaatatggtgaa

SEQ ID NO: 66209 - DNA, 40 bp, Homo sapiens
ttcaccatattgcccaggctggtctcaaactcctgacctt

SEQ ID NO: 66210 - DNA, 40 bp, Homo sapiens
aggtcaggagtttgagaccagcctgggcaatatggtgaaa

SEQ ID NO: 66211 - DNA, 40 bp, Homo sapiens
tttcaccatattgcccaggctggtctcaaactcctgacct

SEQ ID NO: 66212 - DNA, 40 bp, Homo sapiens
ggtcaggagtttgagaccagcctgggcaatatggtgaaac

SEQ ID NO: 66213 - DNA, 40 bp, Homo sapiens
gtttcaccatattgcccaggctggtctcaaactcctgacc

SEQ ID NO: 66214 - DNA, 40 bp, Homo sapiens
gtcaggagtttgagaccagcctgggcaatatggtgaaacc

SEQ ID NO: 66215 - DNA, 40 bp, Homo sapiens
ggtttcaccatattgcccaggctggtctcaaactcctgac

SEQ ID NO: 66216 - DNA, 40 bp, Homo sapiens
tcaggagtttgagaccagcctgggcaatatggtgaaaccc

SEQ ID NO: 66217 - DNA, 40 bp, Homo sapiens
gggtttcaccatattgcccaggctggtctcaaactcctga

SEQ ID NO: 66218 - DNA, 40 bp, Homo sapiens
caggagtttgagaccagcctgggcaatatggtgaaacccc

SEQ ID NO: 66219 - DNA, 40 bp, Homo sapiens
ggggtttcaccatattgcccaggctggtctcaaactcctg

SEQ ID NO: 66220 - DNA, 40 bp, Homo sapiens
aggagtttgagaccagcctgggcaatatggtgaaaccccc

SEQ ID NO: 66221 - DNA, 40 bp, Homo sapiens
gggggtttcaccatattgcccaggctggtctcaaactcct

SEQ ID NO: 66222 - DNA, 40 bp, Homo sapiens
ggagtttgagaccagcctgggcaatatggtgaaacccccc

SEQ ID NO: 66223 - DNA, 40 bp, Homo sapiens
ggggggtttcaccatattgcccaggctggtctcaaactcc

SEQ ID NO: 66224 - DNA, 40 bp, Homo sapiens
gagtttgagaccagcctgggcaatatggtgaaacccccct

SEQ ID NO: 66225 - DNA, 40 bp, Homo sapiens
aggggggtttcaccatattgcccaggctggtctcaaactc

SEQ ID NO: 66226 - DNA, 40 bp, Homo sapiens
agtttgagaccagcctgggcaatatggtgaaacccccctc

SEQ ID NO: 66227 - DNA, 40 bp, Homo sapiens
gaggggggtttcaccatattgcccaggctggtctcaaact

SEQ ID NO: 66228 - DNA, 40 bp, Homo sapiens
gtttgagaccagcctgggcaatatggtgaaacccccctct

SEQ ID NO: 66229 - DNA, 40 bp, Homo sapiens
agaggggggtttcaccatattgcccaggctggtctcaaac

SEQ ID NO: 66230 - DNA, 40 bp, Homo sapiens
tttgagaccagcctgggcaatatggtgaaacccccctcta

SEQ ID NO: 66231 - DNA, 40 bp, Homo sapiens
tagaggggggtttcaccatattgcccaggctggtctcaaa

SEQ ID NO: 66232 - DNA, 40 bp, Homo sapiens
ttgagaccagcctgggcaatatggtgaaacccccctctac

SEQ ID NO: 66233 - DNA, 40 bp, Homo sapiens
gtagaggggggtttcaccatattgcccaggctggtctcaa

SEQ ID NO: 66234 - DNA, 40 bp, Homo sapiens
tgagaccagcctgggcaatatggtgaaacccccctctact

SEQ ID NO: 66235 - DNA, 40 bp, Homo sapiens
agtagaggggggtttcaccatattgcccaggctggtctca

SEQ ID NO: 66236 - DNA, 40 bp, Homo sapiens
gagaccagcctgggcaatatggtgaaacccccctctacta

SEQ ID NO: 66237 - DNA, 40 bp, Homo sapiens
tagtagaggggggtttcaccatattgcccaggctggtctc

SEQ ID NO: 66238 - DNA, 40 bp, Homo sapiens
agaccagcctgggcaatatggtgaaacccccctctactaa

SEQ ID NO: 66239 - DNA, 40 bp, Homo sapiens
ttagtagaggggggtttcaccatattgcccaggctggtct

SEQ ID NO: 66240 - DNA, 40 bp, Homo sapiens
gaccagcctgggcaatatggtgaaacccccctctactaaa

SEQ ID NO: 66241 - DNA, 40 bp, Homo sapiens
tttagtagaggggggtttcaccatattgcccaggctggtc

SEQ ID NO: 66242 - DNA, 40 bp, Homo sapiens
accagcctgggcaatatggtgaaacccccctctactaaaa

SEQ ID NO: 66243 - DNA, 40 bp, Homo sapiens
ttttagtagaggggggtttcaccatattgcccaggctggt

SEQ ID NO: 66244 - DNA, 40 bp, Homo sapiens
ccagcctgggcaatatggtgaaacccccctctactaaaaa

SEQ ID NO: 66245 - DNA, 40 bp, Homo sapiens
tttttagtagaggggggtttcaccatattgcccaggctgg

SEQ ID NO: 66246 - DNA, 40 bp, Homo sapiens
cagcctgggcaatatggtgaaacccccctctactaaaaat

SEQ ID NO: 66247 - DNA, 40 bp, Homo sapiens
atttttagtagaggggggtttcaccatattgcccaggctg

SEQ ID NO: 66248 - DNA, 40 bp, Homo sapiens
agcctgggcaatatggtgaaacccccctctactaaaaata

SEQ ID NO: 66249 - DNA, 40 bp, Homo sapiens
tatttttagtagaggggggtttcaccatattgcccaggct

SEQ ID NO: 66250 - DNA, 40 bp, Homo sapiens
gcctgggcaatatggtgaaacccccctctactaaaaatac

SEQ ID NO: 66251 - DNA, 40 bp, Homo sapiens
gtatttttagtagaggggggtttcaccatattgcccaggc

SEQ ID NO: 66252 - DNA, 40 bp, Homo sapiens
cctgggcaatatggtgaaacccccctctactaaaaataca

SEQ ID NO: 66253 - DNA, 40 bp, Homo sapiens
tgtatttttagtagaggggggtttcaccatattgcccagg

SEQ ID NO: 66254 - DNA, 40 bp, Homo sapiens
ctgggcaatatggtgaaacccccctctactaaaaatacaa

SEQ ID NO: 66255 - DNA, 40 bp, Homo sapiens
ttgtatttttagtagaggggggtttcaccatattgcccag

SEQ ID NO: 66256 - DNA, 40 bp, Homo sapiens
tgggcaatatggtgaaacccccctctactaaaaatacaaa

SEQ ID NO: 66257 - DNA, 40 bp, Homo sapiens
tttgtatttttagtagaggggggtttcaccatattgccca

SEQ ID NO: 66258 - DNA, 40 bp, Homo sapiens
gggcaatatggtgaaacccccctctactaaaaatacaaaa

SEQ ID NO: 66259 - DNA, 40 bp, Homo sapiens
ttttgtatttttagtagaggggggtttcaccatattgccc

SEQ ID NO: 66260 - DNA, 40 bp, Homo sapiens
ggcaatatggtgaaacccccctctactaaaaatacaaaaa

SEQ ID NO: 66261 - DNA, 40 bp, Homo sapiens
tttttgtatttttagtagaggggggtttcaccatattgcc

SEQ ID NO: 66262 - DNA, 40 bp, Homo sapiens
gcaatatggtgaaacccccctctactaaaaatacaaaaat

SEQ ID NO: 66263 - DNA, 40 bp, Homo sapiens
atttttgtatttttagtagaggggggtttcaccatattgc

SEQ ID NO: 66264 - DNA, 40 bp, Homo sapiens
caatatggtgaaacccccctctactaaaaatacaaaaatt

SEQ ID NO: 66265 - DNA, 40 bp, Homo sapiens
aatttttgtatttttagtagaggggggtttcaccatattg

SEQ ID NO: 66266 - DNA, 40 bp, Homo sapiens
aatatggtgaaacccccctctactaaaaatacaaaaatta

SEQ ID NO: 66267 - DNA, 40 bp, Homo sapiens
taatttttgtatttttagtagaggggggtttcaccatatt

SEQ ID NO: 66268 - DNA, 40 bp, Homo sapiens
atatggtgaaacccccctctactaaaaatacaaaaattag

SEQ ID NO: 66269 - DNA, 40 bp, Homo sapiens
ctaatttttgtatttttagtagaggggggtttcaccatat

SEQ ID NO: 66270 - DNA, 40 bp, Homo sapiens
tatggtgaaacccccctctactaaaaatacaaaaattagc

SEQ ID NO: 66271 - DNA, 40 bp, Homo sapiens
gctaatttttgtatttttagtagaggggggtttcaccata

SEQ ID NO: 66272 - DNA, 40 bp, Homo sapiens
atggtgaaacccccctctactaaaaatacaaaaattagct

SEQ ID NO: 66273 - DNA, 40 bp, Homo sapiens
agctaatttttgtatttttagtagaggggggtttcaccat

SEQ ID NO: 66274 - DNA, 40 bp, Homo sapiens
tggtgaaacccccctctactaaaaatacaaaaattagctg

SEQ ID NO: 66275 - DNA, 40 bp, Homo sapiens
cagctaatttttgtatttttagtagaggggggtttcacca

SEQ ID NO: 66276 - DNA, 40 bp, Homo sapiens
ggtgaaacccccctctactaaaaatacaaaaattagctgg

SEQ ID NO: 66277 - DNA, 40 bp, Homo sapiens
ccagctaatttttgtatttttagtagaggggggtttcacc

SEQ ID NO: 66278 - DNA, 40 bp, Homo sapiens
gtgaaacccccctctactaaaaatacaaaaattagctggg

SEQ ID NO: 66279 - DNA, 40 bp, Homo sapiens
cccagctaatttttgtatttttagtagaggggggtttcac

SEQ ID NO: 66280 - DNA, 40 bp, Homo sapiens
tgaaacccccctctactaaaaatacaaaaattagctgggt

SEQ ID NO: 66281 - DNA, 40 bp, Homo sapiens
acccagctaatttttgtatttttagtagaggggggtttca

SEQ ID NO: 66282 - DNA, 40 bp, Homo sapiens
gaaacccccctctactaaaaatacaaaaattagctgggtg

SEQ ID NO: 66283 - DNA, 40 bp, Homo sapiens
cacccagctaatttttgtatttttagtagaggggggtttc

SEQ ID NO: 66284 - DNA, 40 bp, Homo sapiens
aaacccccctctactaaaaatacaaaaattagctgggtgt

SEQ ID NO: 66285 - DNA, 40 bp, Homo sapiens
acacccagctaatttttgtatttttagtagaggggggttt

SEQ ID NO: 66286 - DNA, 40 bp, Homo sapiens
aacccccctctactaaaaatacaaaaattagctgggtgtg

SEQ ID NO: 66287 - DNA, 40 bp, Homo sapiens
cacacccagctaatttttgtatttttagtagaggggggtt

SEQ ID NO: 66288 - DNA, 40 bp, Homo sapiens
acccccctctactaaaaatacaaaaattagctgggtgtgg

SEQ ID NO: 66289 - DNA, 40 bp, Homo sapiens
ccacacccagctaatttttgtatttttagtagaggggggt

SEQ ID NO: 66290 - DNA, 40 bp, Homo sapiens
cccccctctactaaaaatacaaaaattagctgggtgtggt

SEQ ID NO: 66291 - DNA, 40 bp, Homo sapiens
accacacccagctaatttttgtatttttagtagagggggg

SEQ ID NO: 66292 - DNA, 40 bp, Homo sapiens
ccccctctactaaaaatacaaaaattagctgggtgtggtg

SEQ ID NO: 66293 - DNA, 40 bp, Homo sapiens
caccacacccagctaatttttgtatttttagtagaggggg

SEQ ID NO: 66294 - DNA, 40 bp, Homo sapiens
cccctctactaaaaatacaaaaattagctgggtgtggtgg

SEQ ID NO: 66295 - DNA, 40 bp, Homo sapiens
ccaccacacccagctaatttttgtatttttagtagagggg

SEQ ID NO: 66296 - DNA, 40 bp, Homo sapiens
ccctctactaaaaatacaaaaattagctgggtgtggtggt

SEQ ID NO: 66297 - DNA, 40 bp, Homo sapiens
accaccacacccagctaatttttgtatttttagtagaggg

SEQ ID NO: 66298 - DNA, 40 bp, Homo sapiens
cctctactaaaaatacaaaaattagctgggtgtggtggtg

SEQ ID NO: 66299 - DNA, 40 bp, Homo sapiens
caccaccacacccagctaatttttgtatttttagtagagg

SEQ ID NO: 66300 - DNA, 40 bp, Homo sapiens
ctctactaaaaatacaaaaattagctgggtgtggtggtgc

SEQ ID NO: 66301 - DNA, 40 bp, Homo sapiens
gcaccaccacacccagctaatttttgtatttttagtagag

SEQ ID NO: 66302 - DNA, 40 bp, Homo sapiens
tctactaaaaatacaaaaattagctgggtgtggtggtgca

SEQ ID NO: 66303 - DNA, 40 bp, Homo sapiens
tgcaccaccacacccagctaatttttgtatttttagtaga

SEQ ID NO: 66304 - DNA, 40 bp, Homo sapiens
ctactaaaaatacaaaaattagctgggtgtggtggtgcat

SEQ ID NO: 66305 - DNA, 40 bp, Homo sapiens
atgcaccaccacacccagctaatttttgtatttttagtag

SEQ ID NO: 66306 - DNA, 40 bp, Homo sapiens
tactaaaaatacaaaaattagctgggtgtggtggtgcatg

SEQ ID NO: 66307 - DNA, 40 bp, Homo sapiens
catgcaccaccacacccagctaatttttgtatttttagta

SEQ ID NO: 66308 - DNA, 40 bp, Homo sapiens
actaaaaatacaaaaattagctgggtgtggtggtgcatgc

SEQ ID NO: 66309 - DNA, 40 bp, Homo sapiens
gcatgcaccaccacacccagctaatttttgtatttttagt

SEQ ID NO: 66310 - DNA, 40 bp, Homo sapiens
ctaaaaatacaaaaattagctgggtgtggtggtgcatgcc

SEQ ID NO: 66311 - DNA, 40 bp, Homo sapiens
ggcatgcaccaccacacccagctaatttttgtatttttag

SEQ ID NO: 66312 - DNA, 40 bp, Homo sapiens
taaaaatacaaaaattagctgggtgtggtggtgcatgcct

SEQ ID NO: 66313 - DNA, 40 bp, Homo sapiens
aggcatgcaccaccacacccagctaatttttgtattttta

SEQ ID NO: 66314 - DNA, 40 bp, Homo sapiens
aaaaatacaaaaattagctgggtgtggtggtgcatgcctg

SEQ ID NO: 66315 - DNA, 40 bp, Homo sapiens
caggcatgcaccaccacacccagctaatttttgtattttt

SEQ ID NO: 66316 - DNA, 40 bp, Homo sapiens
aaaatacaaaaattagctgggtgtggtggtgcatgcctgt

SEQ ID NO: 66317 - DNA, 40 bp, Homo sapiens
acaggcatgcaccaccacacccagctaatttttgtatttt

SEQ ID NO: 66318 - DNA, 40 bp, Homo sapiens
aaatacaaaaattagctgggtgtggtggtgcatgcctgta

SEQ ID NO: 66319 - DNA, 40 bp, Homo sapiens
tacaggcatgcaccaccacacccagctaatttttgtattt

SEQ ID NO: 66320 - DNA, 40 bp, Homo sapiens
aatacaaaaattagctgggtgtggtggtgcatgcctgtag

SEQ ID NO: 66321 - DNA, 40 bp, Homo sapiens
ctacaggcatgcaccaccacacccagctaatttttgtatt

SEQ ID NO: 66322 - DNA, 40 bp, Homo sapiens
atacaaaaattagctgggtgtggtggtgcatgcctgtagt

SEQ ID NO: 66323 - DNA, 40 bp, Homo sapiens
actacaggcatgcaccaccacacccagctaatttttgtat

SEQ ID NO: 66324 - DNA, 40 bp, Homo sapiens
tacaaaaattagctgggtgtggtggtgcatgcctgtagtc

SEQ ID NO: 66325 - DNA, 40 bp, Homo sapiens
gactacaggcatgcaccaccacacccagctaatttttgta

SEQ ID NO: 66326 - DNA, 40 bp, Homo sapiens
acaaaaattagctgggtgtggtggtgcatgcctgtagtcc

SEQ ID NO: 66327 - DNA, 40 bp, Homo sapiens
ggactacaggcatgcaccaccacacccagctaatttttgt

SEQ ID NO: 66328 - DNA, 40 bp, Homo sapiens
caaaaattagctgggtgtggtggtgcatgcctgtagtccc

SEQ ID NO: 66329 - DNA, 40 bp, Homo sapiens
gggactacaggcatgcaccaccacacccagctaatttttg

SEQ ID NO: 66330 - DNA, 40 bp, Homo sapiens
aaaaattagctgggtgtggtggtgcatgcctgtagtccca

SEQ ID NO: 66331 - DNA, 40 bp, Homo sapiens
tgggactacaggcatgcaccaccacacccagctaattttt

SEQ ID NO: 66332 - DNA, 40 bp, Homo sapiens
aaaattagctgggtgtggtggtgcatgcctgtagtcccag

SEQ ID NO: 66333 - DNA, 40 bp, Homo sapiens
ctgggactacaggcatgcaccaccacacccagctaatttt

SEQ ID NO: 66334 - DNA, 40 bp, Homo sapiens
aaattagctgggtgtggtggtgcatgcctgtagtcccagc

SEQ ID NO: 66335 - DNA, 40 bp, Homo sapiens
gctgggactacaggcatgcaccaccacacccagctaattt

SEQ ID NO: 66336 - DNA, 40 bp, Homo sapiens
aattagctgggtgtggtggtgcatgcctgtagtcccagct

SEQ ID NO: 66337 - DNA, 40 bp, Homo sapiens
agctgggactacaggcatgcaccaccacacccagctaatt

SEQ ID NO: 66338 - DNA, 40 bp, Homo sapiens
attagctgggtgtggtggtgcatgcctgtagtcccagcta

SEQ ID NO: 66339 - DNA, 40 bp, Homo sapiens
tagctgggactacaggcatgcaccaccacacccagctaat

SEQ ID NO: 66340 - DNA, 40 bp, Homo sapiens
ttagctgggtgtggtggtgcatgcctgtagtcccagctac

SEQ ID NO: 66341 - DNA, 40 bp, Homo sapiens
gtagctgggactacaggcatgcaccaccacacccagctaa

SEQ ID NO: 66342 - DNA, 40 bp, Homo sapiens
tagctgggtgtggtggtgcatgcctgtagtcccagctact

SEQ ID NO: 66343 - DNA, 40 bp, Homo sapiens
agtagctgggactacaggcatgcaccaccacacccagcta

SEQ ID NO: 66344 - DNA, 40 bp, Homo sapiens
agctgggtgtggtggtgcatgcctgtagtcccagctactc

SEQ ID NO: 66345 - DNA, 40 bp, Homo sapiens
gagtagctgggactacaggcatgcaccaccacacccagct

SEQ ID NO: 66346 - DNA, 40 bp, Homo sapiens
gctgggtgtggtggtgcatgcctgtagtcccagctactca

SEQ ID NO: 66347 - DNA, 40 bp, Homo sapiens
tgagtagctgggactacaggcatgcaccaccacacccagc

SEQ ID NO: 66348 - DNA, 40 bp, Homo sapiens
ctgggtgtggtggtgcatgcctgtagtcccagctactcag

SEQ ID NO: 66349 - DNA, 40 bp, Homo sapiens
ctgagtagctgggactacaggcatgcaccaccacacccag

SEQ ID NO: 66350 - DNA, 40 bp, Homo sapiens
tgggtgtggtggtgcatgcctgtagtcccagctactcagg

SEQ ID NO: 66351 - DNA, 40 bp, Homo sapiens
cctgagtagctgggactacaggcatgcaccaccacaccca

SEQ ID NO: 66352 - DNA, 40 bp, Homo sapiens
gggtgtggtggtgcatgcctgtagtcccagctactcagga

SEQ ID NO: 66353 - DNA, 40 bp, Homo sapiens
tcctgagtagctgggactacaggcatgcaccaccacaccc

SEQ ID NO: 66354 - DNA, 40 bp, Homo sapiens
ggtgtggtggtgcatgcctgtagtcccagctactcaggag

SEQ ID NO: 66355 - DNA, 40 bp, Homo sapiens
ctcctgagtagctgggactacaggcatgcaccaccacacc

SEQ ID NO: 66356 - DNA, 40 bp, Homo sapiens
gtgtggtggtgcatgcctgtagtcccagctactcaggagg

SEQ ID NO: 66357 - DNA, 40 bp, Homo sapiens
cctcctgagtagctgggactacaggcatgcaccaccacac

SEQ ID NO: 66358 - DNA, 40 bp, Homo sapiens
tgtggtggtgcatgcctgtagtcccagctactcaggaggc

SEQ ID NO: 66359 - DNA, 40 bp, Homo sapiens
gcctcctgagtagctgggactacaggcatgcaccaccaca

SEQ ID NO: 66360 - DNA, 40 bp, Homo sapiens
gtggtggtgcatgcctgtagtcccagctactcaggaggct

SEQ ID NO: 66361 - DNA, 40 bp, Homo sapiens
agcctcctgagtagctgggactacaggcatgcaccaccac

SEQ ID NO: 66362 - DNA, 40 bp, Homo sapiens
tggtggtgcatgcctgtagtcccagctactcaggaggctg

SEQ ID NO: 66363 - DNA, 40 bp, Homo sapiens
cagcctcctgagtagctgggactacaggcatgcaccacca

SEQ ID NO: 66364 - DNA, 40 bp, Homo sapiens
ggtggtgcatgcctgtagtcccagctactcaggaggctga

SEQ ID NO: 66365 - DNA, 40 bp, Homo sapiens
tcagcctcctgagtagctgggactacaggcatgcaccacc

SEQ ID NO: 66366 - DNA, 40 bp, Homo sapiens
gtggtgcatgcctgtagtcccagctactcaggaggctgag

SEQ ID NO: 66367 - DNA, 40 bp, Homo sapiens
ctcagcctcctgagtagctgggactacaggcatgcaccac

SEQ ID NO: 66368 - DNA, 40 bp, Homo sapiens
tggtgcatgcctgtagtcccagctactcaggaggctgagg

SEQ ID NO: 66369 - DNA, 40 bp, Homo sapiens
cctcagcctcctgagtagctgggactacaggcatgcacca

SEQ ID NO: 66370 - DNA, 40 bp, Homo sapiens
ggtgcatgcctgtagtcccagctactcaggaggctgaggc

SEQ ID NO: 66371 - DNA, 40 bp, Homo sapiens
gcctcagcctcctgagtagctgggactacaggcatgcacc

SEQ ID NO: 66372 - DNA, 40 bp, Homo sapiens
gtgcatgcctgtagtcccagctactcaggaggctgaggca

SEQ ID NO: 66373 - DNA, 40 bp, Homo sapiens
tgcctcagcctcctgagtagctgggactacaggcatgcac

SEQ ID NO: 66374 - DNA, 40 bp, Homo sapiens
tgcatgcctgtagtcccagctactcaggaggctgaggcag

SEQ ID NO: 66375 - DNA, 40 bp, Homo sapiens
ctgcctcagcctcctgagtagctgggactacaggcatgca

SEQ ID NO: 66376 - DNA, 40 bp, Homo sapiens
gcatgcctgtagtcccagctactcaggaggctgaggcagg

SEQ ID NO: 66377 - DNA, 40 bp, Homo sapiens
cctgcctcagcctcctgagtagctgggactacaggcatgc

SEQ ID NO: 66378 - DNA, 40 bp, Homo sapiens
catgcctgtagtcccagctactcaggaggctgaggcagga

SEQ ID NO: 66379 - DNA, 40 bp, Homo sapiens
tcctgcctcagcctcctgagtagctgggactacaggcatg

SEQ ID NO: 66380 - DNA, 40 bp, Homo sapiens
atgcctgtagtcccagctactcaggaggctgaggcaggag

SEQ ID NO: 66381 - DNA, 40 bp, Homo sapiens
ctcctgcctcagcctcctgagtagctgggactacaggcat

SEQ ID NO: 66382 - DNA, 40 bp, Homo sapiens
tgcctgtagtcccagctactcaggaggctgaggcaggaga

SEQ ID NO: 66383 - DNA, 40 bp, Homo sapiens
tctcctgcctcagcctcctgagtagctgggactacaggca

SEQ ID NO: 66384 - DNA, 40 bp, Homo sapiens
gcctgtagtcccagctactcaggaggctgaggcaggagaa

SEQ ID NO: 66385 - DNA, 40 bp, Homo sapiens
ttctcctgcctcagcctcctgagtagctgggactacaggc

SEQ ID NO: 66386 - DNA, 40 bp, Homo sapiens
cctgtagtcccagctactcaggaggctgaggcaggagaat

SEQ ID NO: 66387 - DNA, 40 bp, Homo sapiens
attctcctgcctcagcctcctgagtagctgggactacagg

SEQ ID NO: 66388 - DNA, 40 bp, Homo sapiens
ctgtagtcccagctactcaggaggctgaggcaggagaatc

SEQ ID NO: 66389 - DNA, 40 bp, Homo sapiens
gattctcctgcctcagcctcctgagtagctgggactacag

SEQ ID NO: 66390 - DNA, 40 bp, Homo sapiens
tgtagtcccagctactcaggaggctgaggcaggagaatcg

SEQ ID NO: 66391 - DNA, 40 bp, Homo sapiens
cgattctcctgcctcagcctcctgagtagctgggactaca

SEQ ID NO: 66392 - DNA, 40 bp, Homo sapiens
gtagtcccagctactcaggaggctgaggcaggagaatcgc

SEQ ID NO: 66393 - DNA, 40 bp, Homo sapiens
gcgattctcctgcctcagcctcctgagtagctgggactac

SEQ ID NO: 66394 - DNA, 40 bp, Homo sapiens
tagtcccagctactcaggaggctgaggcaggagaatcgct

SEQ ID NO: 66395 - DNA, 40 bp, Homo sapiens
agcgattctcctgcctcagcctcctgagtagctgggacta

SEQ ID NO: 66396 - DNA, 40 bp, Homo sapiens
agtcccagctactcaggaggctgaggcaggagaatcgctt

SEQ ID NO: 66397 - DNA, 40 bp, Homo sapiens
aagcgattctcctgcctcagcctcctgagtagctgggact

SEQ ID NO: 66398 - DNA, 40 bp, Homo sapiens
gtcccagctactcaggaggctgaggcaggagaatcgcttg

SEQ ID NO: 66399 - DNA, 40 bp, Homo sapiens
caagcgattctcctgcctcagcctcctgagtagctgggac

SEQ ID NO: 66400 - DNA, 40 bp, Homo sapiens
tcccagctactcaggaggctgaggcaggagaatcgcttga

SEQ ID NO: 66401 - DNA, 40 bp, Homo sapiens
tcaagcgattctcctgcctcagcctcctgagtagctggga

SEQ ID NO: 66402 - DNA, 40 bp, Homo sapiens
cccagctactcaggaggctgaggcaggagaatcgcttgaa

SEQ ID NO: 66403 - DNA, 40 bp, Homo sapiens
ttcaagcgattctcctgcctcagcctcctgagtagctggg

SEQ ID NO: 66404 - DNA, 40 bp, Homo sapiens
ccagctactcaggaggctgaggcaggagaatcgcttgaac

SEQ ID NO: 66405 - DNA, 40 bp, Homo sapiens
gttcaagcgattctcctgcctcagcctcctgagtagctgg

SEQ ID NO: 66406 - DNA, 40 bp, Homo sapiens
cagctactcaggaggctgaggcaggagaatcgcttgaacc

SEQ ID NO: 66407 - DNA, 40 bp, Homo sapiens
ggttcaagcgattctcctgcctcagcctcctgagtagctg

SEQ ID NO: 66408 - DNA, 40 bp, Homo sapiens
agctactcaggaggctgaggcaggagaatcgcttgaaccc

SEQ ID NO: 66409 - DNA, 40 bp, Homo sapiens
gggttcaagcgattctcctgcctcagcctcctgagtagct

SEQ ID NO: 66410 - DNA, 40 bp, Homo sapiens
gctactcaggaggctgaggcaggagaatcgcttgaacccg

SEQ ID NO: 66411 - DNA, 40 bp, Homo sapiens
cgggttcaagcgattctcctgcctcagcctcctgagtagc

SEQ ID NO: 66412 - DNA, 40 bp, Homo sapiens
ctactcaggaggctgaggcaggagaatcgcttgaacccgg

SEQ ID NO: 66413 - DNA, 40 bp, Homo sapiens
ccgggttcaagcgattctcctgcctcagcctcctgagtag

SEQ ID NO: 66414 - DNA, 40 bp, Homo sapiens
tactcaggaggctgaggcaggagaatcgcttgaacccgga

SEQ ID NO: 66415 - DNA, 40 bp, Homo sapiens
tccgggttcaagcgattctcctgcctcagcctcctgagta

SEQ ID NO: 66416 - DNA, 40 bp, Homo sapiens
actcaggaggctgaggcaggagaatcgcttgaacccggag

SEQ ID NO: 66417 - DNA, 40 bp, Homo sapiens
ctccgggttcaagcgattctcctgcctcagcctcctgagt

SEQ ID NO: 66418 - DNA, 40 bp, Homo sapiens
ctcaggaggctgaggcaggagaatcgcttgaacccggagg

SEQ ID NO: 66419 - DNA, 40 bp, Homo sapiens
cctccgggttcaagcgattctcctgcctcagcctcctgag

SEQ ID NO: 66420 - DNA, 40 bp, Homo sapiens
tcaggaggctgaggcaggagaatcgcttgaacccggaggt

SEQ ID NO: 66421 - DNA, 40 bp, Homo sapiens
acctccgggttcaagcgattctcctgcctcagcctcctga

SEQ ID NO: 66422 - DNA, 40 bp, Homo sapiens
caggaggctgaggcaggagaatcgcttgaacccggaggtg

SEQ ID NO: 66423 - DNA, 40 bp, Homo sapiens
cacctccgggttcaagcgattctcctgcctcagcctcctg

SEQ ID NO: 66424 - DNA, 40 bp, Homo sapiens
aggaggctgaggcaggagaatcgcttgaacccggaggtgg

SEQ ID NO: 66425 - DNA, 40 bp, Homo sapiens
ccacctccgggttcaagcgattctcctgcctcagcctcct

SEQ ID NO: 66426 - DNA, 40 bp, Homo sapiens
ggaggctgaggcaggagaatcgcttgaacccggaggtggc

SEQ ID NO: 66427 - DNA, 40 bp, Homo sapiens
gccacctccgggttcaagcgattctcctgcctcagcctcc

SEQ ID NO: 66428 - DNA, 40 bp, Homo sapiens
gaggctgaggcaggagaatcgcttgaacccggaggtggcg

SEQ ID NO: 66429 - DNA, 40 bp, Homo sapiens
cgccacctccgggttcaagcgattctcctgcctcagcctc

SEQ ID NO: 66430 - DNA, 40 bp, Homo sapiens
aggctgaggcaggagaatcgcttgaacccggaggtggcgg

SEQ ID NO: 66431 - DNA, 40 bp, Homo sapiens
ccgccacctccgggttcaagcgattctcctgcctcagcct

SEQ ID NO: 66432 - DNA, 40 bp, Homo sapiens
ggctgaggcaggagaatcgcttgaacccggaggtggcggt

SEQ ID NO: 66433 - DNA, 40 bp, Homo sapiens
accgccacctccgggttcaagcgattctcctgcctcagcc

SEQ ID NO: 66434 - DNA, 40 bp, Homo sapiens
gctgaggcaggagaatcgcttgaacccggaggtggcggtt

SEQ ID NO: 66435 - DNA, 40 bp, Homo sapiens
aaccgccacctccgggttcaagcgattctcctgcctcagc

SEQ ID NO: 66436 - DNA, 40 bp, Homo sapiens
ctgaggcaggagaatcgcttgaacccggaggtggcggttg

SEQ ID NO: 66437 - DNA, 40 bp, Homo sapiens
caaccgccacctccgggttcaagcgattctcctgcctcag

SEQ ID NO: 66438 - DNA, 40 bp, Homo sapiens
tgaggcaggagaatcgcttgaacccggaggtggcggttgc

SEQ ID NO: 66439 - DNA, 40 bp, Homo sapiens
gcaaccgccacctccgggttcaagcgattctcctgcctca

SEQ ID NO: 66440 - DNA, 40 bp, Homo sapiens
gaggcaggagaatcgcttgaacccggaggtggcggttgca

SEQ ID NO: 66441 - DNA, 40 bp, Homo sapiens
tgcaaccgccacctccgggttcaagcgattctcctgcctc

SEQ ID NO: 66442 - DNA, 40 bp, Homo sapiens
aggcaggagaatcgcttgaacccggaggtggcggttgcag

SEQ ID NO: 66443 - DNA, 40 bp, Homo sapiens
ctgcaaccgccacctccgggttcaagcgattctcctgcct

SEQ ID NO: 66444 - DNA, 40 bp, Homo sapiens
ggcaggagaatcgcttgaacccggaggtggcggttgcagt

SEQ ID NO: 66445 - DNA, 40 bp, Homo sapiens
actgcaaccgccacctccgggttcaagcgattctcctgcc

SEQ ID NO: 66446 - DNA, 40 bp, Homo sapiens
gcaggagaatcgcttgaacccggaggtggcggttgcagtg

SEQ ID NO: 66447 - DNA, 40 bp, Homo sapiens
cactgcaaccgccacctccgggttcaagcgattctcctgc

SEQ ID NO: 66448 - DNA, 40 bp, Homo sapiens
caggagaatcgcttgaacccggaggtggcggttgcagtga

SEQ ID NO: 66449 - DNA, 40 bp, Homo sapiens
tcactgcaaccgccacctccgggttcaagcgattctcctg

SEQ ID NO: 66450 - DNA, 40 bp, Homo sapiens
aggagaatcgcttgaacccggaggtggcggttgcagtgag

SEQ ID NO: 66451 - DNA, 40 bp, Homo sapiens
ctcactgcaaccgccacctccgggttcaagcgattctcct

SEQ ID NO: 66452 - DNA, 40 bp, Homo sapiens
ggagaatcgcttgaacccggaggtggcggttgcagtgagc

SEQ ID NO: 66453 - DNA, 40 bp, Homo sapiens
gctcactgcaaccgccacctccgggttcaagcgattctcc

SEQ ID NO: 66454 - DNA, 40 bp, Homo sapiens
gagaatcgcttgaacccggaggtggcggttgcagtgagcc

SEQ ID NO: 66455 - DNA, 40 bp, Homo sapiens
ggctcactgcaaccgccacctccgggttcaagcgattctc

SEQ ID NO: 66456 - DNA, 40 bp, Homo sapiens
agaatcgcttgaacccggaggtggcggttgcagtgagccg

SEQ ID NO: 66457 - DNA, 40 bp, Homo sapiens
cggctcactgcaaccgccacctccgggttcaagcgattct

SEQ ID NO: 66458 - DNA, 40 bp, Homo sapiens
gaatcgcttgaacccggaggtggcggttgcagtgagccga

SEQ ID NO: 66459 - DNA, 40 bp, Homo sapiens
tcggctcactgcaaccgccacctccgggttcaagcgattc

SEQ ID NO: 66460 - DNA, 40 bp, Homo sapiens
aatcgcttgaacccggaggtggcggttgcagtgagccgag

SEQ ID NO: 66461 - DNA, 40 bp, Homo sapiens
ctcggctcactgcaaccgccacctccgggttcaagcgatt

SEQ ID NO: 66462 - DNA, 40 bp, Homo sapiens
atcgcttgaacccggaggtggcggttgcagtgagccgaga

SEQ ID NO: 66463 - DNA, 40 bp, Homo sapiens
tctcggctcactgcaaccgccacctccgggttcaagcgat

SEQ ID NO: 66464 - DNA, 40 bp, Homo sapiens
tcgcttgaacccggaggtggcggttgcagtgagccgagat

SEQ ID NO: 66465 - DNA, 40 bp, Homo sapiens
atctcggctcactgcaaccgccacctccgggttcaagcga

SEQ ID NO: 66466 - DNA, 40 bp, Homo sapiens
cgcttgaacccggaggtggcggttgcagtgagccgagatt

SEQ ID NO: 66467 - DNA, 40 bp, Homo sapiens
aatctcggctcactgcaaccgccacctccgggttcaagcg

SEQ ID NO: 66468 - DNA, 40 bp, Homo sapiens
gcttgaacccggaggtggcggttgcagtgagccgagattg

SEQ ID NO: 66469 - DNA, 40 bp, Homo sapiens
caatctcggctcactgcaaccgccacctccgggttcaagc

SEQ ID NO: 66470 - DNA, 40 bp, Homo sapiens
cttgaacccggaggtggcggttgcagtgagccgagattgc

SEQ ID NO: 66471 - DNA, 40 bp, Homo sapiens
gcaatctcggctcactgcaaccgccacctccgggttcaag

SEQ ID NO: 66472 - DNA, 40 bp, Homo sapiens
ttgaacccggaggtggcggttgcagtgagccgagattgca

SEQ ID NO: 66473 - DNA, 40 bp, Homo sapiens
tgcaatctcggctcactgcaaccgccacctccgggttcaa

SEQ ID NO: 66474 - DNA, 40 bp, Homo sapiens
tgaacccggaggtggcggttgcagtgagccgagattgcac

SEQ ID NO: 66475 - DNA, 40 bp, Homo sapiens
gtgcaatctcggctcactgcaaccgccacctccgggttca

SEQ ID NO: 66476 - DNA, 40 bp, Homo sapiens
gaacccggaggtggcggttgcagtgagccgagattgcacc

SEQ ID NO: 66477 - DNA, 40 bp, Homo sapiens
ggtgcaatctcggctcactgcaaccgccacctccgggttc

SEQ ID NO: 66478 - DNA, 40 bp, Homo sapiens
aacccggaggtggcggttgcagtgagccgagattgcacca

SEQ ID NO: 66479 - DNA, 40 bp, Homo sapiens
tggtgcaatctcggctcactgcaaccgccacctccgggtt

SEQ ID NO: 66480 - DNA, 40 bp, Homo sapiens
acccggaggtggcggttgcagtgagccgagattgcaccac

SEQ ID NO: 66481 - DNA, 40 bp, Homo sapiens
gtggtgcaatctcggctcactgcaaccgccacctccgggt

SEQ ID NO: 66482 - DNA, 40 bp, Homo sapiens
cccggaggtggcggttgcagtgagccgagattgcaccact

SEQ ID NO: 66483 - DNA, 40 bp, Homo sapiens
agtggtgcaatctcggctcactgcaaccgccacctccggg

SEQ ID NO: 66484 - DNA, 40 bp, Homo sapiens
ccggaggtggcggttgcagtgagccgagattgcaccactg

SEQ ID NO: 66485 - DNA, 40 bp, Homo sapiens
cagtggtgcaatctcggctcactgcaaccgccacctccgg

SEQ ID NO: 66486 - DNA, 40 bp, Homo sapiens
cggaggtggcggttgcagtgagccgagattgcaccactgc

SEQ ID NO: 66487 - DNA, 40 bp, Homo sapiens
gcagtggtgcaatctcggctcactgcaaccgccacctccg

SEQ ID NO: 66488 - DNA, 40 bp, Homo sapiens
ggaggtggcggttgcagtgagccgagattgcaccactgca

SEQ ID NO: 66489 - DNA, 40 bp, Homo sapiens
tgcagtggtgcaatctcggctcactgcaaccgccacctcc

SEQ ID NO: 66490 - DNA, 40 bp, Homo sapiens
gaggtggcggttgcagtgagccgagattgcaccactgcag

SEQ ID NO: 66491 - DNA, 40 bp, Homo sapiens
ctgcagtggtgcaatctcggctcactgcaaccgccacctc

SEQ ID NO: 66492 - DNA, 40 bp, Homo sapiens
aggtggcggttgcagtgagccgagattgcaccactgcagt

SEQ ID NO: 66493 - DNA, 40 bp, Homo sapiens
actgcagtggtgcaatctcggctcactgcaaccgccacct

SEQ ID NO: 66494 - DNA, 40 bp, Homo sapiens
ggtggcggttgcagtgagccgagattgcaccactgcagtc

SEQ ID NO: 66495 - DNA, 40 bp, Homo sapiens
gactgcagtggtgcaatctcggctcactgcaaccgccacc

SEQ ID NO: 66496 - DNA, 40 bp, Homo sapiens
gtggcggttgcagtgagccgagattgcaccactgcagtcc

SEQ ID NO: 66497 - DNA, 40 bp, Homo sapiens
ggactgcagtggtgcaatctcggctcactgcaaccgccac

SEQ ID NO: 66498 - DNA, 40 bp, Homo sapiens
tggcggttgcagtgagccgagattgcaccactgcagtcca

SEQ ID NO: 66499 - DNA, 40 bp, Homo sapiens
tggactgcagtggtgcaatctcggctcactgcaaccgcca

SEQ ID NO: 66500 - DNA, 40 bp, Homo sapiens
ggcggttgcagtgagccgagattgcaccactgcagtccag

SEQ ID NO: 66501 - DNA, 40 bp, Homo sapiens
ctggactgcagtggtgcaatctcggctcactgcaaccgcc

SEQ ID NO: 66502 - DNA, 40 bp, Homo sapiens
gcggttgcagtgagccgagattgcaccactgcagtccagc

SEQ ID NO: 66503 - DNA, 40 bp, Homo sapiens
gctggactgcagtggtgcaatctcggctcactgcaaccgc

SEQ ID NO: 66504 - DNA, 40 bp, Homo sapiens
cggttgcagtgagccgagattgcaccactgcagtccagcc

SEQ ID NO: 66505 - DNA, 40 bp, Homo sapiens
ggctggactgcagtggtgcaatctcggctcactgcaaccg

SEQ ID NO: 66506 - DNA, 40 bp, Homo sapiens
ggttgcagtgagccgagattgcaccactgcagtccagcct

SEQ ID NO: 66507 - DNA, 40 bp, Homo sapiens
aggctggactgcagtggtgcaatctcggctcactgcaacc

SEQ ID NO: 66508 - DNA, 40 bp, Homo sapiens
gttgcagtgagccgagattgcaccactgcagtccagcctg

SEQ ID NO: 66509 - DNA, 40 bp, Homo sapiens
caggctggactgcagtggtgcaatctcggctcactgcaac

SEQ ID NO: 66510 - DNA, 40 bp, Homo sapiens
ttgcagtgagccgagattgcaccactgcagtccagcctgg

SEQ ID NO: 66511 - DNA, 40 bp, Homo sapiens
ccaggctggactgcagtggtgcaatctcggctcactgcaa

SEQ ID NO: 66512 - DNA, 40 bp, Homo sapiens
tgcagtgagccgagattgcaccactgcagtccagcctggg

SEQ ID NO: 66513 - DNA, 40 bp, Homo sapiens
cccaggctggactgcagtggtgcaatctcggctcactgca

SEQ ID NO: 66514 - DNA, 40 bp, Homo sapiens
gcagtgagccgagattgcaccactgcagtccagcctgggc

SEQ ID NO: 66515 - DNA, 40 bp, Homo sapiens
gcccaggctggactgcagtggtgcaatctcggctcactgc

SEQ ID NO: 66516 - DNA, 40 bp, Homo sapiens
cagtgagccgagattgcaccactgcagtccagcctgggcg

SEQ ID NO: 66517 - DNA, 40 bp, Homo sapiens
cgcccaggctggactgcagtggtgcaatctcggctcactg

SEQ ID NO: 66518 - DNA, 40 bp, Homo sapiens
agtgagccgagattgcaccactgcagtccagcctgggcgg

SEQ ID NO: 66519 - DNA, 40 bp, Homo sapiens
ccgcccaggctggactgcagtggtgcaatctcggctcact

SEQ ID NO: 66520 - DNA, 40 bp, Homo sapiens
gtgagccgagattgcaccactgcagtccagcctgggcggc

SEQ ID NO: 66521 - DNA, 40 bp, Homo sapiens
gccgcccaggctggactgcagtggtgcaatctcggctcac

SEQ ID NO: 66522 - DNA, 40 bp, Homo sapiens
tgagccgagattgcaccactgcagtccagcctgggcggca

SEQ ID NO: 66523 - DNA, 40 bp, Homo sapiens
tgccgcccaggctggactgcagtggtgcaatctcggctca

SEQ ID NO: 66524 - DNA, 40 bp, Homo sapiens
gagccgagattgcaccactgcagtccagcctgggcggcag

SEQ ID NO: 66525 - DNA, 40 bp, Homo sapiens
ctgccgcccaggctggactgcagtggtgcaatctcggctc

SEQ ID NO: 66526 - DNA, 40 bp, Homo sapiens
agccgagattgcaccactgcagtccagcctgggcggcaga

SEQ ID NO: 66527 - DNA, 40 bp, Homo sapiens
tctgccgcccaggctggactgcagtggtgcaatctcggct

SEQ ID NO: 66528 - DNA, 40 bp, Homo sapiens
gccgagattgcaccactgcagtccagcctgggcggcagag

SEQ ID NO: 66529 - DNA, 40 bp, Homo sapiens
ctctgccgcccaggctggactgcagtggtgcaatctcggc

SEQ ID NO: 66530 - DNA, 40 bp, Homo sapiens
ccgagattgcaccactgcagtccagcctgggcggcagagc

SEQ ID NO: 66531 - DNA, 40 bp, Homo sapiens
gctctgccgcccaggctggactgcagtggtgcaatctcgg

SEQ ID NO: 66532 - DNA, 40 bp, Homo sapiens
cgagattgcaccactgcagtccagcctgggcggcagagcg

SEQ ID NO: 66533 - DNA, 40 bp, Homo sapiens
cgctctgccgcccaggctggactgcagtggtgcaatctcg

SEQ ID NO: 66534 - DNA, 40 bp, Homo sapiens
gagattgcaccactgcagtccagcctgggcggcagagcga

SEQ ID NO: 66535 - DNA, 40 bp, Homo sapiens
tcgctctgccgcccaggctggactgcagtggtgcaatctc

SEQ ID NO: 66536 - DNA, 40 bp, Homo sapiens
agattgcaccactgcagtccagcctgggcggcagagcgag

SEQ ID NO: 66537 - DNA, 40 bp, Homo sapiens
ctcgctctgccgcccaggctggactgcagtggtgcaatct

SEQ ID NO: 66538 - DNA, 40 bp, Homo sapiens
gattgcaccactgcagtccagcctgggcggcagagcgaga

SEQ ID NO: 66539 - DNA, 40 bp, Homo sapiens
tctcgctctgccgcccaggctggactgcagtggtgcaatc

SEQ ID NO: 66540 - DNA, 40 bp, Homo sapiens
attgcaccactgcagtccagcctgggcggcagagcgagac

SEQ ID NO: 66541 - DNA, 40 bp, Homo sapiens
gtctcgctctgccgcccaggctggactgcagtggtgcaat

SEQ ID NO: 66542 - DNA, 40 bp, Homo sapiens
ttgcaccactgcagtccagcctgggcggcagagcgagact

SEQ ID NO: 66543 - DNA, 40 bp, Homo sapiens
agtctcgctctgccgcccaggctggactgcagtggtgcaa

SEQ ID NO: 66544 - DNA, 40 bp, Homo sapiens
tgcaccactgcagtccagcctgggcggcagagcgagactc

SEQ ID NO: 66545 - DNA, 40 bp, Homo sapiens
gagtctcgctctgccgcccaggctggactgcagtggtgca

SEQ ID NO: 66546 - DNA, 40 bp, Homo sapiens
gcaccactgcagtccagcctgggcggcagagcgagactcc

SEQ ID NO: 66547 - DNA, 40 bp, Homo sapiens
ggagtctcgctctgccgcccaggctggactgcagtggtgc

SEQ ID NO: 66548 - DNA, 40 bp, Homo sapiens
caccactgcagtccagcctgggcggcagagcgagactcca

SEQ ID NO: 66549 - DNA, 40 bp, Homo sapiens
tggagtctcgctctgccgcccaggctggactgcagtggtg

SEQ ID NO: 66550 - DNA, 40 bp, Homo sapiens
accactgcagtccagcctgggcggcagagcgagactccat

SEQ ID NO: 66551 - DNA, 40 bp, Homo sapiens
atggagtctcgctctgccgcccaggctggactgcagtggt

SEQ ID NO: 66552 - DNA, 40 bp, Homo sapiens
ccactgcagtccagcctgggcggcagagcgagactccatc

SEQ ID NO: 66553 - DNA, 40 bp, Homo sapiens
gatggagtctcgctctgccgcccaggctggactgcagtgg

SEQ ID NO: 66554 - DNA, 40 bp, Homo sapiens
cactgcagtccagcctgggcggcagagcgagactccatct

SEQ ID NO: 66555 - DNA, 40 bp, Homo sapiens
agatggagtctcgctctgccgcccaggctggactgcagtg

SEQ ID NO: 66556 - DNA, 40 bp, Homo sapiens
actgcagtccagcctgggcggcagagcgagactccatctc

SEQ ID NO: 66557 - DNA, 40 bp, Homo sapiens
gagatggagtctcgctctgccgcccaggctggactgcagt

SEQ ID NO: 66558 - DNA, 40 bp, Homo sapiens
ctgcagtccagcctgggcggcagagcgagactccatctca

SEQ ID NO: 66559 - DNA, 40 bp, Homo sapiens
tgagatggagtctcgctctgccgcccaggctggactgcag

SEQ ID NO: 66560 - DNA, 40 bp, Homo sapiens
tgcagtccagcctgggcggcagagcgagactccatctcaa

SEQ ID NO: 66561 - DNA, 40 bp, Homo sapiens
ttgagatggagtctcgctctgccgcccaggctggactgca

SEQ ID NO: 66562 - DNA, 40 bp, Homo sapiens
gcagtccagcctgggcggcagagcgagactccatctcaaa

SEQ ID NO: 66563 - DNA, 40 bp, Homo sapiens
tttgagatggagtctcgctctgccgcccaggctggactgc

SEQ ID NO: 66564 - DNA, 40 bp, Homo sapiens
cagtccagcctgggcggcagagcgagactccatctcaaaa

SEQ ID NO: 66565 - DNA, 40 bp, Homo sapiens
ttttgagatggagtctcgctctgccgcccaggctggactg

SEQ ID NO: 66566 - DNA, 40 bp, Homo sapiens
agtccagcctgggcggcagagcgagactccatctcaaaaa

SEQ ID NO: 66567 - DNA, 40 bp, Homo sapiens
tttttgagatggagtctcgctctgccgcccaggctggact

SEQ ID NO: 66568 - DNA, 40 bp, Homo sapiens
gtccagcctgggcggcagagcgagactccatctcaaaaaa

SEQ ID NO: 66569 - DNA, 40 bp, Homo sapiens
ttttttgagatggagtctcgctctgccgcccaggctggac

SEQ ID NO: 66570 - DNA, 40 bp, Homo sapiens
tccagcctgggcggcagagcgagactccatctcaaaaaaa

SEQ ID NO: 66571 - DNA, 40 bp, Homo sapiens
tttttttgagatggagtctcgctctgccgcccaggctgga

SEQ ID NO: 66572 - DNA, 40 bp, Homo sapiens
ccagcctgggcggcagagcgagactccatctcaaaaaaaa

SEQ ID NO: 66573 - DNA, 40 bp, Homo sapiens
ttttttttgagatggagtctcgctctgccgcccaggctgg

SEQ ID NO: 66574 - DNA, 40 bp, Homo sapiens
cagcctgggcggcagagcgagactccatctcaaaaaaaaa

SEQ ID NO: 66575 - DNA, 40 bp, Homo sapiens
tttttttttgagatggagtctcgctctgccgcccaggctg

SEQ ID NO: 66576 - DNA, 40 bp, Homo sapiens
agcctgggcggcagagcgagactccatctcaaaaaaaaaa

SEQ ID NO: 66577 - DNA, 40 bp, Homo sapiens
ttttttttttgagatggagtctcgctctgccgcccaggct

SEQ ID NO: 66578 - DNA, 40 bp, Homo sapiens
gcctgggcggcagagcgagactccatctcaaaaaaaaaaa

SEQ ID NO: 66579 - DNA, 40 bp, Homo sapiens
tttttttttttgagatggagtctcgctctgccgcccaggc

SEQ ID NO: 66580 - DNA, 40 bp, Homo sapiens
cctgggcggcagagcgagactccatctcaaaaaaaaaaaa

SEQ ID NO: 66581 - DNA, 40 bp, Homo sapiens
ttttttttttttgagatggagtctcgctctgccgcccagg

SEQ ID NO: 66582 - DNA, 40 bp, Homo sapiens
ctgggcggcagagcgagactccatctcaaaaaaaaaaaac

SEQ ID NO: 66583 - DNA, 40 bp, Homo sapiens
gttttttttttttgagatggagtctcgctctgccgcccag

SEQ ID NO: 66584 - DNA, 40 bp, Homo sapiens
tgggcggcagagcgagactccatctcaaaaaaaaaaaaca

SEQ ID NO: 66585 - DNA, 40 bp, Homo sapiens
tgttttttttttttgagatggagtctcgctctgccgccca

SEQ ID NO: 66586 - DNA, 40 bp, Homo sapiens
gggcggcagagcgagactccatctcaaaaaaaaaaaacaa

SEQ ID NO: 66587 - DNA, 40 bp, Homo sapiens
ttgttttttttttttgagatggagtctcgctctgccgccc

SEQ ID NO: 66588 - DNA, 40 bp, Homo sapiens
ggcggcagagcgagactccatctcaaaaaaaaaaaacaaa

SEQ ID NO: 66589 - DNA, 40 bp, Homo sapiens
tttgttttttttttttgagatggagtctcgctctgccgcc

SEQ ID NO: 66590 - DNA, 40 bp, Homo sapiens
gcggcagagcgagactccatctcaaaaaaaaaaaacaaaa

SEQ ID NO: 66591 - DNA, 40 bp, Homo sapiens
ttttgttttttttttttgagatggagtctcgctctgccgc

SEQ ID NO: 66592 - DNA, 40 bp, Homo sapiens
cggcagagcgagactccatctcaaaaaaaaaaaacaaaaa

SEQ ID NO: 66593 - DNA, 40 bp, Homo sapiens
tttttgttttttttttttgagatggagtctcgctctgccg

SEQ ID NO: 66594 - DNA, 40 bp, Homo sapiens
ggcagagcgagactccatctcaaaaaaaaaaaacaaaaaa

SEQ ID NO: 66595 - DNA, 40 bp, Homo sapiens
ttttttgttttttttttttgagatggagtctcgctctgcc

SEQ ID NO: 66596 - DNA, 40 bp, Homo sapiens
gcagagcgagactccatctcaaaaaaaaaaaacaaaaaaa

SEQ ID NO: 66597 - DNA, 40 bp, Homo sapiens
tttttttgttttttttttttgagatggagtctcgctctgc

SEQ ID NO: 66598 - DNA, 40 bp, Homo sapiens
cagagcgagactccatctcaaaaaaaaaaaacaaaaaaag

SEQ ID NO: 66599 - DNA, 40 bp, Homo sapiens
ctttttttgttttttttttttgagatggagtctcgctctg

SEQ ID NO: 66600 - DNA, 40 bp, Homo sapiens
agagcgagactccatctcaaaaaaaaaaaacaaaaaaaga

SEQ ID NO: 66601 - DNA, 40 bp, Homo sapiens
tctttttttgttttttttttttgagatggagtctcgctct

SEQ ID NO: 66602 - DNA, 40 bp, Homo sapiens
gagcgagactccatctcaaaaaaaaaaaacaaaaaaagaa

SEQ ID NO: 66603 - DNA, 40 bp, Homo sapiens
ttctttttttgttttttttttttgagatggagtctcgctc

SEQ ID NO: 66604 - DNA, 40 bp, Homo sapiens
agcgagactccatctcaaaaaaaaaaaacaaaaaaagaaa

SEQ ID NO: 66605 - DNA, 40 bp, Homo sapiens
tttctttttttgttttttttttttgagatggagtctcgct

SEQ ID NO: 66606 - DNA, 40 bp, Homo sapiens
gcgagactccatctcaaaaaaaaaaaacaaaaaaagaaaa

SEQ ID NO: 66607 - DNA, 40 bp, Homo sapiens
ttttctttttttgttttttttttttgagatggagtctcgc

SEQ ID NO: 66608 - DNA, 40 bp, Homo sapiens
cgagactccatctcaaaaaaaaaaaacaaaaaaagaaaaa

SEQ ID NO: 66609 - DNA, 40 bp, Homo sapiens
tttttctttttttgttttttttttttgagatggagtctcg

SEQ ID NO: 66610 - DNA, 40 bp, Homo sapiens
gagactccatctcaaaaaaaaaaaacaaaaaaagaaaaag

SEQ ID NO: 66611 - DNA, 40 bp, Homo sapiens
ctttttctttttttgttttttttttttgagatggagtctc

SEQ ID NO: 66612 - DNA, 40 bp, Homo sapiens
agactccatctcaaaaaaaaaaaacaaaaaaagaaaaagt

SEQ ID NO: 66613 - DNA, 40 bp, Homo sapiens
actttttctttttttgttttttttttttgagatggagtct

SEQ ID NO: 66614 - DNA, 40 bp, Homo sapiens
gactccatctcaaaaaaaaaaaacaaaaaaagaaaaagtt

SEQ ID NO: 66615 - DNA, 40 bp, Homo sapiens
aactttttctttttttgttttttttttttgagatggagtc

SEQ ID NO: 66616 - DNA, 40 bp, Homo sapiens
actccatctcaaaaaaaaaaaacaaaaaaagaaaaagtta

SEQ ID NO: 66617 - DNA, 40 bp, Homo sapiens
taactttttctttttttgttttttttttttgagatggagt

SEQ ID NO: 66618 - DNA, 40 bp, Homo sapiens
ctccatctcaaaaaaaaaaaacaaaaaaagaaaaagttaa

SEQ ID NO: 66619 - DNA, 40 bp, Homo sapiens
ttaactttttctttttttgttttttttttttgagatggag

SEQ ID NO: 66620 - DNA, 40 bp, Homo sapiens
tccatctcaaaaaaaaaaaacaaaaaaagaaaaagttaaa

SEQ ID NO: 66621 - DNA, 40 bp, Homo sapiens
tttaactttttctttttttgttttttttttttgagatgga

SEQ ID NO: 66622 - DNA, 40 bp, Homo sapiens
ccatctcaaaaaaaaaaaacaaaaaaagaaaaagttaaaa

SEQ ID NO: 66623 - DNA, 40 bp, Homo sapiens
ttttaactttttctttttttgttttttttttttgagatgg

SEQ ID NO: 66624 - DNA, 40 bp, Homo sapiens
catctcaaaaaaaaaaaacaaaaaaagaaaaagttaaaaa

SEQ ID NO: 66625 - DNA, 40 bp, Homo sapiens
tttttaactttttctttttttgttttttttttttgagatg

SEQ ID NO: 66626 - DNA, 40 bp, Homo sapiens
atctcaaaaaaaaaaaacaaaaaaagaaaaagttaaaaaa

SEQ ID NO: 66627 - DNA, 40 bp, Homo sapiens
ttttttaactttttctttttttgttttttttttttgagat

SEQ ID NO: 66628 - DNA, 40 bp, Homo sapiens
tctcaaaaaaaaaaaacaaaaaaagaaaaagttaaaaaaa

SEQ ID NO: 66629 - DNA, 40 bp, Homo sapiens
tttttttaactttttctttttttgttttttttttttgaga

SEQ ID NO: 66630 - DNA, 40 bp, Homo sapiens
ctcaaaaaaaaaaaacaaaaaaagaaaaagttaaaaaaaa

SEQ ID NO: 66631 - DNA, 40 bp, Homo sapiens
ttttttttaactttttctttttttgttttttttttttgag

SEQ ID NO: 66632 - DNA, 40 bp, Homo sapiens
tcaaaaaaaaaaaacaaaaaaagaaaaagttaaaaaaaaa

SEQ ID NO: 66633 - DNA, 40 bp, Homo sapiens
tttttttttaactttttctttttttgttttttttttttga

SEQ ID NO: 66634 - DNA, 40 bp, Homo sapiens
caaaaaaaaaaaacaaaaaaagaaaaagttaaaaaaaaac

SEQ ID NO: 66635 - DNA, 40 bp, Homo sapiens
gtttttttttaactttttctttttttgttttttttttttg

SEQ ID NO: 66636 - DNA, 40 bp, Homo sapiens
aaaaaaaaaaaacaaaaaaagaaaaagttaaaaaaaaaca

SEQ ID NO: 66637 - DNA, 40 bp, Homo sapiens
tgtttttttttaactttttctttttttgtttttttttttt

SEQ ID NO: 66638 - DNA, 40 bp, Homo sapiens
aaaaaaaaaaacaaaaaaagaaaaagttaaaaaaaaacaa

SEQ ID NO: 66639 - DNA, 40 bp, Homo sapiens
ttgtttttttttaactttttctttttttgttttttttttt

SEQ ID NO: 66640 - DNA, 40 bp, Homo sapiens
aaaaaaaaaacaaaaaaagaaaaagttaaaaaaaaacaaa

SEQ ID NO: 66641 - DNA, 40 bp, Homo sapiens
tttgtttttttttaactttttctttttttgtttttttttt

SEQ ID NO: 66642 - DNA, 40 bp, Homo sapiens
aaaaaaaaacaaaaaaagaaaaagttaaaaaaaaacaaaa

SEQ ID NO: 66643 - DNA, 40 bp, Homo sapiens
ttttgtttttttttaactttttctttttttgttttttttt

SEQ ID NO: 66644 - DNA, 40 bp, Homo sapiens
aaaaaaaacaaaaaaagaaaaagttaaaaaaaaacaaaaa

SEQ ID NO: 66645 - DNA, 40 bp, Homo sapiens
tttttgtttttttttaactttttctttttttgtttttttt

SEQ ID NO: 66646 - DNA, 40 bp, Homo sapiens
aaaaaaacaaaaaaagaaaaagttaaaaaaaaacaaaaaa

SEQ ID NO: 66647 - DNA, 40 bp, Homo sapiens
ttttttgtttttttttaactttttctttttttgttttttt

SEQ ID NO: 66648 - DNA, 40 bp, Homo sapiens
aaaaaacaaaaaaagaaaaagttaaaaaaaaacaaaaaac

SEQ ID NO: 66649 - DNA, 40 bp, Homo sapiens
gttttttgtttttttttaactttttctttttttgtttttt

SEQ ID NO: 66650 - DNA, 40 bp, Homo sapiens
aaaaacaaaaaaagaaaaagttaaaaaaaaacaaaaaacc

SEQ ID NO: 66651 - DNA, 40 bp, Homo sapiens
ggttttttgtttttttttaactttttctttttttgttttt

SEQ ID NO: 66652 - DNA, 40 bp, Homo sapiens
aaaacaaaaaaagaaaaagttaaaaaaaaacaaaaaaccc

SEQ ID NO: 66653 - DNA, 40 bp, Homo sapiens
gggttttttgtttttttttaactttttctttttttgtttt

SEQ ID NO: 66654 - DNA, 40 bp, Homo sapiens
aaacaaaaaaagaaaaagttaaaaaaaaacaaaaaacccc

SEQ ID NO: 66655 - DNA, 40 bp, Homo sapiens
ggggttttttgtttttttttaactttttctttttttgttt

SEQ ID NO: 66656 - DNA, 40 bp, Homo sapiens
aacaaaaaaagaaaaagttaaaaaaaaacaaaaaaccccc

SEQ ID NO: 66657 - DNA, 40 bp, Homo sapiens
gggggttttttgtttttttttaactttttctttttttgtt

SEQ ID NO: 66658 - DNA, 40 bp, Homo sapiens
acaaaaaaagaaaaagttaaaaaaaaacaaaaaaccccca

SEQ ID NO: 66659 - DNA, 40 bp, Homo sapiens
tgggggttttttgtttttttttaactttttctttttttgt

SEQ ID NO: 66660 - DNA, 40 bp, Homo sapiens
caaaaaaagaaaaagttaaaaaaaaacaaaaaacccccac

SEQ ID NO: 66661 - DNA, 40 bp, Homo sapiens
gtgggggttttttgtttttttttaactttttctttttttg

SEQ ID NO: 66662 - DNA, 40 bp, Homo sapiens
aaaaaaagaaaaagttaaaaaaaaacaaaaaacccccaca

SEQ ID NO: 66663 - DNA, 40 bp, Homo sapiens
tgtgggggttttttgtttttttttaactttttcttttttt

SEQ ID NO: 66664 - DNA, 40 bp, Homo sapiens
aaaaaagaaaaagttaaaaaaaaacaaaaaacccccacaa

SEQ ID NO: 66665 - DNA, 40 bp, Homo sapiens
ttgtgggggttttttgtttttttttaactttttctttttt

SEQ ID NO: 66666 - DNA, 40 bp, Homo sapiens
aaaaagaaaaagttaaaaaaaaacaaaaaacccccacaaa

SEQ ID NO: 66667 - DNA, 40 bp, Homo sapiens
tttgtgggggttttttgtttttttttaactttttcttttt

SEQ ID NO: 66668 - DNA, 40 bp, Homo sapiens
aaaagaaaaagttaaaaaaaaacaaaaaacccccacaaaa

SEQ ID NO: 66669 - DNA, 40 bp, Homo sapiens
ttttgtgggggttttttgtttttttttaactttttctttt

SEQ ID NO: 66670 - DNA, 40 bp, Homo sapiens
aaagaaaaagttaaaaaaaaacaaaaaacccccacaaaat

SEQ ID NO: 66671 - DNA, 40 bp, Homo sapiens
attttgtgggggttttttgtttttttttaactttttcttt

SEQ ID NO: 66672 - DNA, 40 bp, Homo sapiens
aagaaaaagttaaaaaaaaacaaaaaacccccacaaaatg

SEQ ID NO: 66673 - DNA, 40 bp, Homo sapiens
cattttgtgggggttttttgtttttttttaactttttctt

SEQ ID NO: 66674 - DNA, 40 bp, Homo sapiens
agaaaaagttaaaaaaaaacaaaaaacccccacaaaatga

SEQ ID NO: 66675 - DNA, 40 bp, Homo sapiens
tcattttgtgggggttttttgtttttttttaactttttct

SEQ ID NO: 66676 - DNA, 40 bp, Homo sapiens
gaaaaagttaaaaaaaaacaaaaaacccccacaaaatgag

SEQ ID NO: 66677 - DNA, 40 bp, Homo sapiens
ctcattttgtgggggttttttgtttttttttaactttttc

SEQ ID NO: 66678 - DNA, 40 bp, Homo sapiens
aaaaagttaaaaaaaaacaaaaaacccccacaaaatgagt

SEQ ID NO: 66679 - DNA, 40 bp, Homo sapiens
actcattttgtgggggttttttgtttttttttaacttttt

SEQ ID NO: 66680 - DNA, 40 bp, Homo sapiens
aaaagttaaaaaaaaacaaaaaacccccacaaaatgagta

SEQ ID NO: 66681 - DNA, 40 bp, Homo sapiens
tactcattttgtgggggttttttgtttttttttaactttt

SEQ ID NO: 66682 - DNA, 40 bp, Homo sapiens
aaagttaaaaaaaaacaaaaaacccccacaaaatgagtat

SEQ ID NO: 66683 - DNA, 40 bp, Homo sapiens
atactcattttgtgggggttttttgtttttttttaacttt

SEQ ID NO: 66684 - DNA, 40 bp, Homo sapiens
aagttaaaaaaaaacaaaaaacccccacaaaatgagtata

SEQ ID NO: 66685 - DNA, 40 bp, Homo sapiens
tatactcattttgtgggggttttttgtttttttttaactt

SEQ ID NO: 66686 - DNA, 40 bp, Homo sapiens
agttaaaaaaaaacaaaaaacccccacaaaatgagtatat

SEQ ID NO: 66687 - DNA, 40 bp, Homo sapiens
atatactcattttgtgggggttttttgtttttttttaact

SEQ ID NO: 66688 - DNA, 40 bp, Homo sapiens
gttaaaaaaaaacaaaaaacccccacaaaatgagtatatg

SEQ ID NO: 66689 - DNA, 40 bp, Homo sapiens
catatactcattttgtgggggttttttgtttttttttaac

SEQ ID NO: 66690 - DNA, 40 bp, Homo sapiens
ttaaaaaaaaacaaaaaacccccacaaaatgagtatatgt

SEQ ID NO: 66691 - DNA, 40 bp, Homo sapiens
acatatactcattttgtgggggttttttgtttttttttaa

SEQ ID NO: 66692 - DNA, 40 bp, Homo sapiens
taaaaaaaaacaaaaaacccccacaaaatgagtatatgtg

SEQ ID NO: 66693 - DNA, 40 bp, Homo sapiens
cacatatactcattttgtgggggttttttgttttttttta

SEQ ID NO: 66694 - DNA, 40 bp, Homo sapiens
aaaaaaaaacaaaaaacccccacaaaatgagtatatgtgg

SEQ ID NO: 66695 - DNA, 40 bp, Homo sapiens
ccacatatactcattttgtgggggttttttgttttttttt

SEQ ID NO: 66696 - DNA, 40 bp, Homo sapiens
aaaaaaaacaaaaaacccccacaaaatgagtatatgtggc

SEQ ID NO: 66697 - DNA, 40 bp, Homo sapiens
gccacatatactcattttgtgggggttttttgtttttttt

SEQ ID NO: 66698 - DNA, 40 bp, Homo sapiens
aaaaaaacaaaaaacccccacaaaatgagtatatgtggca

SEQ ID NO: 66699 - DNA, 40 bp, Homo sapiens
tgccacatatactcattttgtgggggttttttgttttttt

SEQ ID NO: 66700 - DNA, 40 bp, Homo sapiens
aaaaaacaaaaaacccccacaaaatgagtatatgtggcaa

SEQ ID NO: 66701 - DNA, 40 bp, Homo sapiens
ttgccacatatactcattttgtgggggttttttgtttttt

SEQ ID NO: 66702 - DNA, 40 bp, Homo sapiens
aaaaacaaaaaacccccacaaaatgagtatatgtggcaac

SEQ ID NO: 66703 - DNA, 40 bp, Homo sapiens
gttgccacatatactcattttgtgggggttttttgttttt

SEQ ID NO: 66704 - DNA, 40 bp, Homo sapiens
aaaacaaaaaacccccacaaaatgagtatatgtggcaaca

SEQ ID NO: 66705 - DNA, 40 bp, Homo sapiens
tgttgccacatatactcattttgtgggggttttttgtttt

SEQ ID NO: 66706 - DNA, 40 bp, Homo sapiens
aaacaaaaaacccccacaaaatgagtatatgtggcaacaa

SEQ ID NO: 66707 - DNA, 40 bp, Homo sapiens
ttgttgccacatatactcattttgtgggggttttttgttt

SEQ ID NO: 66708 - DNA, 40 bp, Homo sapiens
aacaaaaaacccccacaaaatgagtatatgtggcaacaag

SEQ ID NO: 66709 - DNA, 40 bp, Homo sapiens
cttgttgccacatatactcattttgtgggggttttttgtt

SEQ ID NO: 66710 - DNA, 40 bp, Homo sapiens
acaaaaaacccccacaaaatgagtatatgtggcaacaagt

SEQ ID NO: 66711 - DNA, 40 bp, Homo sapiens
acttgttgccacatatactcattttgtgggggttttttgt

SEQ ID NO: 66712 - DNA, 40 bp, Homo sapiens
caaaaaacccccacaaaatgagtatatgtggcaacaagtc

SEQ ID NO: 66713 - DNA, 40 bp, Homo sapiens
gacttgttgccacatatactcattttgtgggggttttttg

SEQ ID NO: 66714 - DNA, 40 bp, Homo sapiens
aaaaaacccccacaaaatgagtatatgtggcaacaagtcc

SEQ ID NO: 66715 - DNA, 40 bp, Homo sapiens
ggacttgttgccacatatactcattttgtgggggtttttt

SEQ ID NO: 66716 - DNA, 40 bp, Homo sapiens
aaaaacccccacaaaatgagtatatgtggcaacaagtcct

SEQ ID NO: 66717 - DNA, 40 bp, Homo sapiens
aggacttgttgccacatatactcattttgtgggggttttt

SEQ ID NO: 66718 - DNA, 40 bp, Homo sapiens
aaaacccccacaaaatgagtatatgtggcaacaagtccta

SEQ ID NO: 66719 - DNA, 40 bp, Homo sapiens
taggacttgttgccacatatactcattttgtgggggtttt

SEQ ID NO: 66720 - DNA, 40 bp, Homo sapiens
aaacccccacaaaatgagtatatgtggcaacaagtcctat

SEQ ID NO: 66721 - DNA, 40 bp, Homo sapiens
ataggacttgttgccacatatactcattttgtgggggttt

SEQ ID NO: 66722 - DNA, 40 bp, Homo sapiens
aacccccacaaaatgagtatatgtggcaacaagtcctatt

SEQ ID NO: 66723 - DNA, 40 bp, Homo sapiens
aataggacttgttgccacatatactcattttgtgggggtt

SEQ ID NO: 66724 - DNA, 40 bp, Homo sapiens
acccccacaaaatgagtatatgtggcaacaagtcctattc

SEQ ID NO: 66725 - DNA, 40 bp, Homo sapiens
gaataggacttgttgccacatatactcattttgtgggggt

SEQ ID NO: 66726 - DNA, 40 bp, Homo sapiens
cccccacaaaatgagtatatgtggcaacaagtcctattct

SEQ ID NO: 66727 - DNA, 40 bp, Homo sapiens
agaataggacttgttgccacatatactcattttgtggggg

SEQ ID NO: 66728 - DNA, 40 bp, Homo sapiens
ccccacaaaatgagtatatgtggcaacaagtcctattctc

SEQ ID NO: 66729 - DNA, 40 bp, Homo sapiens
gagaataggacttgttgccacatatactcattttgtgggg

SEQ ID NO: 66730 - DNA, 40 bp, Homo sapiens
cccacaaaatgagtatatgtggcaacaagtcctattctca

SEQ ID NO: 66731 - DNA, 40 bp, Homo sapiens
tgagaataggacttgttgccacatatactcattttgtggg

SEQ ID NO: 66732 - DNA, 40 bp, Homo sapiens
ccacaaaatgagtatatgtggcaacaagtcctattctcaa

SEQ ID NO: 66733 - DNA, 40 bp, Homo sapiens
ttgagaataggacttgttgccacatatactcattttgtgg

SEQ ID NO: 66734 - DNA, 40 bp, Homo sapiens
cacaaaatgagtatatgtggcaacaagtcctattctcaaa

SEQ ID NO: 66735 - DNA, 40 bp, Homo sapiens
tttgagaataggacttgttgccacatatactcattttgtg

SEQ ID NO: 66736 - DNA, 40 bp, Homo sapiens
acaaaatgagtatatgtggcaacaagtcctattctcaaaa

SEQ ID NO: 66737 - DNA, 40 bp, Homo sapiens
ttttgagaataggacttgttgccacatatactcattttgt

SEQ ID NO: 66738 - DNA, 40 bp, Homo sapiens
caaaatgagtatatgtggcaacaagtcctattctcaaaaa

SEQ ID NO: 66739 - DNA, 40 bp, Homo sapiens
tttttgagaataggacttgttgccacatatactcattttg

SEQ ID NO: 66740 - DNA, 40 bp, Homo sapiens
aaaatgagtatatgtggcaacaagtcctattctcaaaaaa

SEQ ID NO: 66741 - DNA, 40 bp, Homo sapiens
ttttttgagaataggacttgttgccacatatactcatttt

SEQ ID NO: 66742 - DNA, 40 bp, Homo sapiens
aaatgagtatatgtggcaacaagtcctattctcaaaaaaa

SEQ ID NO: 66743 - DNA, 40 bp, Homo sapiens
tttttttgagaataggacttgttgccacatatactcattt

SEQ ID NO: 66744 - DNA, 40 bp, Homo sapiens
aatgagtatatgtggcaacaagtcctattctcaaaaaaat

SEQ ID NO: 66745 - DNA, 40 bp, Homo sapiens
atttttttgagaataggacttgttgccacatatactcatt

SEQ ID NO: 66746 - DNA, 40 bp, Homo sapiens
atgagtatatgtggcaacaagtcctattctcaaaaaaatt

SEQ ID NO: 66747 - DNA, 40 bp, Homo sapiens
aatttttttgagaataggacttgttgccacatatactcat

SEQ ID NO: 66748 - DNA, 40 bp, Homo sapiens
tgagtatatgtggcaacaagtcctattctcaaaaaaatta

SEQ ID NO: 66749 - DNA, 40 bp, Homo sapiens
taatttttttgagaataggacttgttgccacatatactca

SEQ ID NO: 66750 - DNA, 40 bp, Homo sapiens
gagtatatgtggcaacaagtcctattctcaaaaaaattat

SEQ ID NO: 66751 - DNA, 40 bp, Homo sapiens
ataatttttttgagaataggacttgttgccacatatactc

SEQ ID NO: 66752 - DNA, 40 bp, Homo sapiens
agtatatgtggcaacaagtcctattctcaaaaaaattatt

SEQ ID NO: 66753 - DNA, 40 bp, Homo sapiens
aataatttttttgagaataggacttgttgccacatatact

SEQ ID NO: 66754 - DNA, 40 bp, Homo sapiens
gtatatgtggcaacaagtcctattctcaaaaaaattattg

SEQ ID NO: 66755 - DNA, 40 bp, Homo sapiens
caataatttttttgagaataggacttgttgccacatatac

SEQ ID NO: 66756 - DNA, 40 bp, Homo sapiens
tatatgtggcaacaagtcctattctcaaaaaaattattgt

SEQ ID NO: 66757 - DNA, 40 bp, Homo sapiens
acaataatttttttgagaataggacttgttgccacatata

SEQ ID NO: 66758 - DNA, 40 bp, Homo sapiens
atatgtggcaacaagtcctattctcaaaaaaattattgtg

SEQ ID NO: 66759 - DNA, 40 bp, Homo sapiens
cacaataatttttttgagaataggacttgttgccacatat

SEQ ID NO: 66760 - DNA, 40 bp, Homo sapiens
tatgtggcaacaagtcctattctcaaaaaaattattgtgt

SEQ ID NO: 66761 - DNA, 40 bp, Homo sapiens
acacaataatttttttgagaataggacttgttgccacata

SEQ ID NO: 66762 - DNA, 40 bp, Homo sapiens
atgtggcaacaagtcctattctcaaaaaaattattgtgtg

SEQ ID NO: 66763 - DNA, 40 bp, Homo sapiens
cacacaataatttttttgagaataggacttgttgccacat

SEQ ID NO: 66764 - DNA, 40 bp, Homo sapiens
tgtggcaacaagtcctattctcaaaaaaattattgtgtgc

SEQ ID NO: 66765 - DNA, 40 bp, Homo sapiens
gcacacaataatttttttgagaataggacttgttgccaca

SEQ ID NO: 66766 - DNA, 40 bp, Homo sapiens
gtggcaacaagtcctattctcaaaaaaattattgtgtgct

SEQ ID NO: 66767 - DNA, 40 bp, Homo sapiens
agcacacaataatttttttgagaataggacttgttgccac

SEQ ID NO: 66768 - DNA, 40 bp, Homo sapiens
tggcaacaagtcctattctcaaaaaaattattgtgtgcta

SEQ ID NO: 66769 - DNA, 40 bp, Homo sapiens
tagcacacaataatttttttgagaataggacttgttgcca

SEQ ID NO: 66770 - DNA, 40 bp, Homo sapiens
ggcaacaagtcctattctcaaaaaaattattgtgtgctag

SEQ ID NO: 66771 - DNA, 40 bp, Homo sapiens
ctagcacacaataatttttttgagaataggacttgttgcc

SEQ ID NO: 66772 - DNA, 40 bp, Homo sapiens
gcaacaagtcctattctcaaaaaaattattgtgtgctagt

SEQ ID NO: 66773 - DNA, 40 bp, Homo sapiens
actagcacacaataatttttttgagaataggacttgttgc

SEQ ID NO: 66774 - DNA, 40 bp, Homo sapiens
caacaagtcctattctcaaaaaaattattgtgtgctagtt

SEQ ID NO: 66775 - DNA, 40 bp, Homo sapiens
aactagcacacaataatttttttgagaataggacttgttg

SEQ ID NO: 66776 - DNA, 40 bp, Homo sapiens
aacaagtcctattctcaaaaaaattattgtgtgctagtta

SEQ ID NO: 66777 - DNA, 40 bp, Homo sapiens
taactagcacacaataatttttttgagaataggacttgtt

SEQ ID NO: 66778 - DNA, 40 bp, Homo sapiens
acaagtcctattctcaaaaaaattattgtgtgctagttaa

SEQ ID NO: 66779 - DNA, 40 bp, Homo sapiens
ttaactagcacacaataatttttttgagaataggacttgt

SEQ ID NO: 66780 - DNA, 40 bp, Homo sapiens
caagtcctattctcaaaaaaattattgtgtgctagttaag

SEQ ID NO: 66781 - DNA, 40 bp, Homo sapiens
cttaactagcacacaataatttttttgagaataggacttg

SEQ ID NO: 66782 - DNA, 40 bp, Homo sapiens
aagtcctattctcaaaaaaattattgtgtgctagttaaga

SEQ ID NO: 66783 - DNA, 40 bp, Homo sapiens
tcttaactagcacacaataatttttttgagaataggactt

SEQ ID NO: 66784 - DNA, 40 bp, Homo sapiens
agtcctattctcaaaaaaattattgtgtgctagttaagag

SEQ ID NO: 66785 - DNA, 40 bp, Homo sapiens
ctcttaactagcacacaataatttttttgagaataggact

SEQ ID NO: 66786 - DNA, 40 bp, Homo sapiens
gtcctattctcaaaaaaattattgtgtgctagttaagagc

SEQ ID NO: 66787 - DNA, 40 bp, Homo sapiens
gctcttaactagcacacaataatttttttgagaataggac

SEQ ID NO: 66788 - DNA, 40 bp, Homo sapiens
tcctattctcaaaaaaattattgtgtgctagttaagagct

SEQ ID NO: 66789 - DNA, 40 bp, Homo sapiens
agctcttaactagcacacaataatttttttgagaatagga

SEQ ID NO: 66790 - DNA, 40 bp, Homo sapiens
cctattctcaaaaaaattattgtgtgctagttaagagctt

SEQ ID NO: 66791 - DNA, 40 bp, Homo sapiens
aagctcttaactagcacacaataatttttttgagaatagg

SEQ ID NO: 66792 - DNA, 40 bp, Homo sapiens
ctattctcaaaaaaattattgtgtgctagttaagagctta

SEQ ID NO: 66793 - DNA, 40 bp, Homo sapiens
taagctcttaactagcacacaataatttttttgagaatag

SEQ ID NO: 66794 - DNA, 40 bp, Homo sapiens
tattctcaaaaaaattattgtgtgctagttaagagcttaa

SEQ ID NO: 66795 - DNA, 40 bp, Homo sapiens
ttaagctcttaactagcacacaataatttttttgagaata

SEQ ID NO: 66796 - DNA, 40 bp, Homo sapiens
attctcaaaaaaattattgtgtgctagttaagagcttaat

SEQ ID NO: 66797 - DNA, 40 bp, Homo sapiens
attaagctcttaactagcacacaataatttttttgagaat

SEQ ID NO: 66798 - DNA, 40 bp, Homo sapiens
ttctcaaaaaaattattgtgtgctagttaagagcttaatg

SEQ ID NO: 66799 - DNA, 40 bp, Homo sapiens
cattaagctcttaactagcacacaataatttttttgagaa

SEQ ID NO: 66800 - DNA, 40 bp, Homo sapiens
tctcaaaaaaattattgtgtgctagttaagagcttaatga

SEQ ID NO: 66801 - DNA, 40 bp, Homo sapiens
tcattaagctcttaactagcacacaataatttttttgaga

SEQ ID NO: 66802 - DNA, 40 bp, Homo sapiens
ctcaaaaaaattattgtgtgctagttaagagcttaatgag

SEQ ID NO: 66803 - DNA, 40 bp, Homo sapiens
ctcattaagctcttaactagcacacaataatttttttgag

SEQ ID NO: 66804 - DNA, 40 bp, Homo sapiens
tcaaaaaaattattgtgtgctagttaagagcttaatgagt

SEQ ID NO: 66805 - DNA, 40 bp, Homo sapiens
actcattaagctcttaactagcacacaataatttttttga

SEQ ID NO: 66806 - DNA, 40 bp, Homo sapiens
caaaaaaattattgtgtgctagttaagagcttaatgagta

SEQ ID NO: 66807 - DNA, 40 bp, Homo sapiens
tactcattaagctcttaactagcacacaataatttttttg

SEQ ID NO: 66808 - DNA, 40 bp, Homo sapiens
aaaaaaattattgtgtgctagttaagagcttaatgagtag

SEQ ID NO: 66809 - DNA, 40 bp, Homo sapiens
ctactcattaagctcttaactagcacacaataattttttt

SEQ ID NO: 66810 - DNA, 40 bp, Homo sapiens
aaaaaattattgtgtgctagttaagagcttaatgagtagc

SEQ ID NO: 66811 - DNA, 40 bp, Homo sapiens
gctactcattaagctcttaactagcacacaataatttttt

SEQ ID NO: 66812 - DNA, 40 bp, Homo sapiens
aaaaattattgtgtgctagttaagagcttaatgagtagcc

SEQ ID NO: 66813 - DNA, 40 bp, Homo sapiens
ggctactcattaagctcttaactagcacacaataattttt

SEQ ID NO: 66814 - DNA, 40 bp, Homo sapiens
aaaattattgtgtgctagttaagagcttaatgagtagcca

SEQ ID NO: 66815 - DNA, 40 bp, Homo sapiens
tggctactcattaagctcttaactagcacacaataatttt

SEQ ID NO: 66816 - DNA, 40 bp, Homo sapiens
aaattattgtgtgctagttaagagcttaatgagtagccag

SEQ ID NO: 66817 - DNA, 40 bp, Homo sapiens
ctggctactcattaagctcttaactagcacacaataattt

SEQ ID NO: 66818 - DNA, 40 bp, Homo sapiens
aattattgtgtgctagttaagagcttaatgagtagccagt

SEQ ID NO: 66819 - DNA, 40 bp, Homo sapiens
actggctactcattaagctcttaactagcacacaataatt

SEQ ID NO: 66820 - DNA, 40 bp, Homo sapiens
attattgtgtgctagttaagagcttaatgagtagccagtc

SEQ ID NO: 66821 - DNA, 40 bp, Homo sapiens
gactggctactcattaagctcttaactagcacacaataat

SEQ ID NO: 66822 - DNA, 40 bp, Homo sapiens
ttattgtgtgctagttaagagcttaatgagtagccagtcg

SEQ ID NO: 66823 - DNA, 40 bp, Homo sapiens
cgactggctactcattaagctcttaactagcacacaataa

SEQ ID NO: 66824 - DNA, 40 bp, Homo sapiens
tattgtgtgctagttaagagcttaatgagtagccagtcgg

SEQ ID NO: 66825 - DNA, 40 bp, Homo sapiens
ccgactggctactcattaagctcttaactagcacacaata

SEQ ID NO: 66826 - DNA, 40 bp, Homo sapiens
attgtgtgctagttaagagcttaatgagtagccagtcggt

SEQ ID NO: 66827 - DNA, 40 bp, Homo sapiens
accgactggctactcattaagctcttaactagcacacaat

SEQ ID NO: 66828 - DNA, 40 bp, Homo sapiens
ttgtgtgctagttaagagcttaatgagtagccagtcggta

SEQ ID NO: 66829 - DNA, 40 bp, Homo sapiens
taccgactggctactcattaagctcttaactagcacacaa

SEQ ID NO: 66830 - DNA, 40 bp, Homo sapiens
tgtgtgctagttaagagcttaatgagtagccagtcggtat

SEQ ID NO: 66831 - DNA, 40 bp, Homo sapiens
ataccgactggctactcattaagctcttaactagcacaca

SEQ ID NO: 66832 - DNA, 40 bp, Homo sapiens
gtgtgctagttaagagcttaatgagtagccagtcggtatt

SEQ ID NO: 66833 - DNA, 40 bp, Homo sapiens
aataccgactggctactcattaagctcttaactagcacac

SEQ ID NO: 66834 - DNA, 40 bp, Homo sapiens
tgtgctagttaagagcttaatgagtagccagtcggtatta

SEQ ID NO: 66835 - DNA, 40 bp, Homo sapiens
taataccgactggctactcattaagctcttaactagcaca

SEQ ID NO: 66836 - DNA, 40 bp, Homo sapiens
gtgctagttaagagcttaatgagtagccagtcggtattaa

SEQ ID NO: 66837 - DNA, 40 bp, Homo sapiens
ttaataccgactggctactcattaagctcttaactagcac

SEQ ID NO: 66838 - DNA, 40 bp, Homo sapiens
tgctagttaagagcttaatgagtagccagtcggtattaaa

SEQ ID NO: 66839 - DNA, 40 bp, Homo sapiens
tttaataccgactggctactcattaagctcttaactagca

SEQ ID NO: 66840 - DNA, 40 bp, Homo sapiens
gctagttaagagcttaatgagtagccagtcggtattaaat

SEQ ID NO: 66841 - DNA, 40 bp, Homo sapiens
atttaataccgactggctactcattaagctcttaactagc

SEQ ID NO: 66842 - DNA, 40 bp, Homo sapiens
ctagttaagagcttaatgagtagccagtcggtattaaata

SEQ ID NO: 66843 - DNA, 40 bp, Homo sapiens
tatttaataccgactggctactcattaagctcttaactag

SEQ ID NO: 66844 - DNA, 40 bp, Homo sapiens
tagttaagagcttaatgagtagccagtcggtattaaatat

SEQ ID NO: 66845 - DNA, 40 bp, Homo sapiens
atatttaataccgactggctactcattaagctcttaacta

SEQ ID NO: 66846 - DNA, 40 bp, Homo sapiens
agttaagagcttaatgagtagccagtcggtattaaatatc

SEQ ID NO: 66847 - DNA, 40 bp, Homo sapiens
gatatttaataccgactggctactcattaagctcttaact

SEQ ID NO: 66848 - DNA, 40 bp, Homo sapiens
gttaagagcttaatgagtagccagtcggtattaaatatct

SEQ ID NO: 66849 - DNA, 40 bp, Homo sapiens
agatatttaataccgactggctactcattaagctcttaac

SEQ ID NO: 66850 - DNA, 40 bp, Homo sapiens
ttaagagcttaatgagtagccagtcggtattaaatatctg

SEQ ID NO: 66851 - DNA, 40 bp, Homo sapiens
cagatatttaataccgactggctactcattaagctcttaa

SEQ ID NO: 66852 - DNA, 40 bp, Homo sapiens
taagagcttaatgagtagccagtcggtattaaatatctgt

SEQ ID NO: 66853 - DNA, 40 bp, Homo sapiens
acagatatttaataccgactggctactcattaagctctta

SEQ ID NO: 66854 - DNA, 40 bp, Homo sapiens
aagagcttaatgagtagccagtcggtattaaatatctgtt

SEQ ID NO: 66855 - DNA, 40 bp, Homo sapiens
aacagatatttaataccgactggctactcattaagctctt

SEQ ID NO: 66856 - DNA, 40 bp, Homo sapiens
agagcttaatgagtagccagtcggtattaaatatctgttt

SEQ ID NO: 66857 - DNA, 40 bp, Homo sapiens
aaacagatatttaataccgactggctactcattaagctct

SEQ ID NO: 66858 - DNA, 40 bp, Homo sapiens
gagcttaatgagtagccagtcggtattaaatatctgtttc

SEQ ID NO: 66859 - DNA, 40 bp, Homo sapiens
gaaacagatatttaataccgactggctactcattaagctc

SEQ ID NO: 66860 - DNA, 40 bp, Homo sapiens
agcttaatgagtagccagtcggtattaaatatctgtttca

SEQ ID NO: 66861 - DNA, 40 bp, Homo sapiens
tgaaacagatatttaataccgactggctactcattaagct

SEQ ID NO: 66862 - DNA, 40 bp, Homo sapiens
gcttaatgagtagccagtcggtattaaatatctgtttcag

SEQ ID NO: 66863 - DNA, 40 bp, Homo sapiens
ctgaaacagatatttaataccgactggctactcattaagc

SEQ ID NO: 66864 - DNA, 40 bp, Homo sapiens
cttaatgagtagccagtcggtattaaatatctgtttcagc

SEQ ID NO: 66865 - DNA, 40 bp, Homo sapiens
gctgaaacagatatttaataccgactggctactcattaag

SEQ ID NO: 66866 - DNA, 40 bp, Homo sapiens
ttaatgagtagccagtcggtattaaatatctgtttcagct

SEQ ID NO: 66867 - DNA, 40 bp, Homo sapiens
agctgaaacagatatttaataccgactggctactcattaa

SEQ ID NO: 66868 - DNA, 40 bp, Homo sapiens
taatgagtagccagtcggtattaaatatctgtttcagcta

SEQ ID NO: 66869 - DNA, 40 bp, Homo sapiens
tagctgaaacagatatttaataccgactggctactcatta

SEQ ID NO: 66870 - DNA, 40 bp, Homo sapiens
aatgagtagccagtcggtattaaatatctgtttcagctat

SEQ ID NO: 66871 - DNA, 40 bp, Homo sapiens
atagctgaaacagatatttaataccgactggctactcatt

SEQ ID NO: 66872 - DNA, 40 bp, Homo sapiens
atgagtagccagtcggtattaaatatctgtttcagctata

SEQ ID NO: 66873 - DNA, 40 bp, Homo sapiens
tatagctgaaacagatatttaataccgactggctactcat

SEQ ID NO: 66874 - DNA, 40 bp, Homo sapiens
tgagtagccagtcggtattaaatatctgtttcagctatat

SEQ ID NO: 66875 - DNA, 40 bp, Homo sapiens
atatagctgaaacagatatttaataccgactggctactca

SEQ ID NO: 66876 - DNA, 40 bp, Homo sapiens
gagtagccagtcggtattaaatatctgtttcagctatatt

SEQ ID NO: 66877 - DNA, 40 bp, Homo sapiens
aatatagctgaaacagatatttaataccgactggctactc

SEQ ID NO: 66878 - DNA, 40 bp, Homo sapiens
agtagccagtcggtattaaatatctgtttcagctatattt

SEQ ID NO: 66879 - DNA, 40 bp, Homo sapiens
aaatatagctgaaacagatatttaataccgactggctact

SEQ ID NO: 66880 - DNA, 40 bp, Homo sapiens
gtagccagtcggtattaaatatctgtttcagctatatttt

SEQ ID NO: 66881 - DNA, 40 bp, Homo sapiens
aaaatatagctgaaacagatatttaataccgactggctac

SEQ ID NO: 66882 - DNA, 40 bp, Homo sapiens
tagccagtcggtattaaatatctgtttcagctatatttta

SEQ ID NO: 66883 - DNA, 40 bp, Homo sapiens
taaaatatagctgaaacagatatttaataccgactggcta

SEQ ID NO: 66884 - DNA, 40 bp, Homo sapiens
agccagtcggtattaaatatctgtttcagctatattttat

SEQ ID NO: 66885 - DNA, 40 bp, Homo sapiens
ataaaatatagctgaaacagatatttaataccgactggct

SEQ ID NO: 66886 - DNA, 40 bp, Homo sapiens
gccagtcggtattaaatatctgtttcagctatattttatc

SEQ ID NO: 66887 - DNA, 40 bp, Homo sapiens
gataaaatatagctgaaacagatatttaataccgactggc

SEQ ID NO: 66888 - DNA, 40 bp, Homo sapiens
ccagtcggtattaaatatctgtttcagctatattttatct

SEQ ID NO: 66889 - DNA, 40 bp, Homo sapiens
agataaaatatagctgaaacagatatttaataccgactgg

SEQ ID NO: 66890 - DNA, 40 bp, Homo sapiens
cagtcggtattaaatatctgtttcagctatattttatctt

SEQ ID NO: 66891 - DNA, 40 bp, Homo sapiens
aagataaaatatagctgaaacagatatttaataccgactg

SEQ ID NO: 66892 - DNA, 40 bp, Homo sapiens
agtcggtattaaatatctgtttcagctatattttatcttt

SEQ ID NO: 66893 - DNA, 40 bp, Homo sapiens
aaagataaaatatagctgaaacagatatttaataccgact

SEQ ID NO: 66894 - DNA, 40 bp, Homo sapiens
gtcggtattaaatatctgtttcagctatattttatcttta

SEQ ID NO: 66895 - DNA, 40 bp, Homo sapiens
taaagataaaatatagctgaaacagatatttaataccgac

SEQ ID NO: 66896 - DNA, 40 bp, Homo sapiens
tcggtattaaatatctgtttcagctatattttatctttaa

SEQ ID NO: 66897 - DNA, 40 bp, Homo sapiens
ttaaagataaaatatagctgaaacagatatttaataccga

SEQ ID NO: 66898 - DNA, 40 bp, Homo sapiens
cggtattaaatatctgtttcagctatattttatctttaaa

SEQ ID NO: 66899 - DNA, 40 bp, Homo sapiens
tttaaagataaaatatagctgaaacagatatttaataccg

SEQ ID NO: 66900 - DNA, 40 bp, Homo sapiens
ggtattaaatatctgtttcagctatattttatctttaaaa

SEQ ID NO: 66901 - DNA, 40 bp, Homo sapiens
ttttaaagataaaatatagctgaaacagatatttaatacc

SEQ ID NO: 66902 - DNA, 40 bp, Homo sapiens
gtattaaatatctgtttcagctatattttatctttaaaaa

SEQ ID NO: 66903 - DNA, 40 bp, Homo sapiens
tttttaaagataaaatatagctgaaacagatatttaatac

SEQ ID NO: 66904 - DNA, 40 bp, Homo sapiens
tattaaatatctgtttcagctatattttatctttaaaaat

SEQ ID NO: 66905 - DNA, 40 bp, Homo sapiens
atttttaaagataaaatatagctgaaacagatatttaata

SEQ ID NO: 66906 - DNA, 40 bp, Homo sapiens
attaaatatctgtttcagctatattttatctttaaaaatt

SEQ ID NO: 66907 - DNA, 40 bp, Homo sapiens
aatttttaaagataaaatatagctgaaacagatatttaat

SEQ ID NO: 66908 - DNA, 40 bp, Homo sapiens
ttaaatatctgtttcagctatattttatctttaaaaatta

SEQ ID NO: 66909 - DNA, 40 bp, Homo sapiens
taatttttaaagataaaatatagctgaaacagatatttaa

SEQ ID NO: 66910 - DNA, 40 bp, Homo sapiens
taaatatctgtttcagctatattttatctttaaaaattat

SEQ ID NO: 66911 - DNA, 40 bp, Homo sapiens
ataatttttaaagataaaatatagctgaaacagatattta

SEQ ID NO: 66912 - DNA, 40 bp, Homo sapiens
aaatatctgtttcagctatattttatctttaaaaattatc

SEQ ID NO: 66913 - DNA, 40 bp, Homo sapiens
gataatttttaaagataaaatatagctgaaacagatattt

SEQ ID NO: 66914 - DNA, 40 bp, Homo sapiens
aatatctgtttcagctatattttatctttaaaaattatct

SEQ ID NO: 66915 - DNA, 40 bp, Homo sapiens
agataatttttaaagataaaatatagctgaaacagatatt

SEQ ID NO: 66916 - DNA, 40 bp, Homo sapiens
atatctgtttcagctatattttatctttaaaaattatcta

SEQ ID NO: 66917 - DNA, 40 bp, Homo sapiens
tagataatttttaaagataaaatatagctgaaacagatat

SEQ ID NO: 66918 - DNA, 40 bp, Homo sapiens
tatctgtttcagctatattttatctttaaaaattatctac

SEQ ID NO: 66919 - DNA, 40 bp, Homo sapiens
gtagataatttttaaagataaaatatagctgaaacagata

SEQ ID NO: 66920 - DNA, 40 bp, Homo sapiens
atctgtttcagctatattttatctttaaaaattatctaca

SEQ ID NO: 66921 - DNA, 40 bp, Homo sapiens
tgtagataatttttaaagataaaatatagctgaaacagat

SEQ ID NO: 66922 - DNA, 40 bp, Homo sapiens
tctgtttcagctatattttatctttaaaaattatctacag

SEQ ID NO: 66923 - DNA, 40 bp, Homo sapiens
ctgtagataatttttaaagataaaatatagctgaaacaga

SEQ ID NO: 66924 - DNA, 40 bp, Homo sapiens
ctgtttcagctatattttatctttaaaaattatctacaga

SEQ ID NO: 66925 - DNA, 40 bp, Homo sapiens
tctgtagataatttttaaagataaaatatagctgaaacag

SEQ ID NO: 66926 - DNA, 40 bp, Homo sapiens
tgtttcagctatattttatctttaaaaattatctacagat

SEQ ID NO: 66927 - DNA, 40 bp, Homo sapiens
atctgtagataatttttaaagataaaatatagctgaaaca

SEQ ID NO: 66928 - DNA, 40 bp, Homo sapiens
gtttcagctatattttatctttaaaaattatctacagatt

SEQ ID NO: 66929 - DNA, 40 bp, Homo sapiens
aatctgtagataatttttaaagataaaatatagctgaaac

SEQ ID NO: 66930 - DNA, 40 bp, Homo sapiens
tttcagctatattttatctttaaaaattatctacagattt

SEQ ID NO: 66931 - DNA, 40 bp, Homo sapiens
aaatctgtagataatttttaaagataaaatatagctgaaa

SEQ ID NO: 66932 - DNA, 40 bp, Homo sapiens
ttcagctatattttatctttaaaaattatctacagatttt

SEQ ID NO: 66933 - DNA, 40 bp, Homo sapiens
aaaatctgtagataatttttaaagataaaatatagctgaa

SEQ ID NO: 66934 - DNA, 40 bp, Homo sapiens
tcagctatattttatctttaaaaattatctacagattttg

SEQ ID NO: 66935 - DNA, 40 bp, Homo sapiens
caaaatctgtagataatttttaaagataaaatatagctga

SEQ ID NO: 66936 - DNA, 40 bp, Homo sapiens
cagctatattttatctttaaaaattatctacagattttgg

SEQ ID NO: 66937 - DNA, 40 bp, Homo sapiens
ccaaaatctgtagataatttttaaagataaaatatagctg

SEQ ID NO: 66938 - DNA, 40 bp, Homo sapiens
agctatattttatctttaaaaattatctacagattttgga

SEQ ID NO: 66939 - DNA, 40 bp, Homo sapiens
tccaaaatctgtagataatttttaaagataaaatatagct

SEQ ID NO: 66940 - DNA, 40 bp, Homo sapiens
gctatattttatctttaaaaattatctacagattttggaa

SEQ ID NO: 66941 - DNA, 40 bp, Homo sapiens
ttccaaaatctgtagataatttttaaagataaaatatagc

SEQ ID NO: 66942 - DNA, 40 bp, Homo sapiens
ctatattttatctttaaaaattatctacagattttggaat

SEQ ID NO: 66943 - DNA, 40 bp, Homo sapiens
attccaaaatctgtagataatttttaaagataaaatatag

SEQ ID NO: 66944 - DNA, 40 bp, Homo sapiens
tatattttatctttaaaaattatctacagattttggaatg

SEQ ID NO: 66945 - DNA, 40 bp, Homo sapiens
cattccaaaatctgtagataatttttaaagataaaatata

SEQ ID NO: 66946 - DNA, 40 bp, Homo sapiens
atattttatctttaaaaattatctacagattttggaatgt

SEQ ID NO: 66947 - DNA, 40 bp, Homo sapiens
acattccaaaatctgtagataatttttaaagataaaatat

SEQ ID NO: 66948 - DNA, 40 bp, Homo sapiens
tattttatctttaaaaattatctacagattttggaatgtg

SEQ ID NO: 66949 - DNA, 40 bp, Homo sapiens
cacattccaaaatctgtagataatttttaaagataaaata

SEQ ID NO: 66950 - DNA, 40 bp, Homo sapiens
attttatctttaaaaattatctacagattttggaatgtga

SEQ ID NO: 66951 - DNA, 40 bp, Homo sapiens
tcacattccaaaatctgtagataatttttaaagataaaat

SEQ ID NO: 66952 - DNA, 40 bp, Homo sapiens
ttttatctttaaaaattatctacagattttggaatgtgaa

SEQ ID NO: 66953 - DNA, 40 bp, Homo sapiens
ttcacattccaaaatctgtagataatttttaaagataaaa

SEQ ID NO: 66954 - DNA, 40 bp, Homo sapiens
tttatctttaaaaattatctacagattttggaatgtgaaa

SEQ ID NO: 66955 - DNA, 40 bp, Homo sapiens
tttcacattccaaaatctgtagataatttttaaagataaa

SEQ ID NO: 66956 - DNA, 40 bp, Homo sapiens
ttatctttaaaaattatctacagattttggaatgtgaaaa

SEQ ID NO: 66957 - DNA, 40 bp, Homo sapiens
ttttcacattccaaaatctgtagataatttttaaagataa

SEQ ID NO: 66958 - DNA, 40 bp, Homo sapiens
tatctttaaaaattatctacagattttggaatgtgaaaaa

SEQ ID NO: 66959 - DNA, 40 bp, Homo sapiens
tttttcacattccaaaatctgtagataatttttaaagata

SEQ ID NO: 66960 - DNA, 40 bp, Homo sapiens
atctttaaaaattatctacagattttggaatgtgaaaaac

SEQ ID NO: 66961 - DNA, 40 bp, Homo sapiens
gtttttcacattccaaaatctgtagataatttttaaagat

SEQ ID NO: 66962 - DNA, 40 bp, Homo sapiens
tctttaaaaattatctacagattttggaatgtgaaaaact

SEQ ID NO: 66963 - DNA, 40 bp, Homo sapiens
agtttttcacattccaaaatctgtagataatttttaaaga

SEQ ID NO: 66964 - DNA, 40 bp, Homo sapiens
ctttaaaaattatctacagattttggaatgtgaaaaacta

SEQ ID NO: 66965 - DNA, 40 bp, Homo sapiens
tagtttttcacattccaaaatctgtagataatttttaaag

SEQ ID NO: 66966 - DNA, 40 bp, Homo sapiens
tttaaaaattatctacagattttggaatgtgaaaaactag

SEQ ID NO: 66967 - DNA, 40 bp, Homo sapiens
ctagtttttcacattccaaaatctgtagataatttttaaa

SEQ ID NO: 66968 - DNA, 40 bp, Homo sapiens
ttaaaaattatctacagattttggaatgtgaaaaactagt

SEQ ID NO: 66969 - DNA, 40 bp, Homo sapiens
actagtttttcacattccaaaatctgtagataatttttaa

SEQ ID NO: 66970 - DNA, 40 bp, Homo sapiens
taaaaattatctacagattttggaatgtgaaaaactagtg

SEQ ID NO: 66971 - DNA, 40 bp, Homo sapiens
cactagtttttcacattccaaaatctgtagataattttta

SEQ ID NO: 66972 - DNA, 40 bp, Homo sapiens
aaaaattatctacagattttggaatgtgaaaaactagtgt

SEQ ID NO: 66973 - DNA, 40 bp, Homo sapiens
acactagtttttcacattccaaaatctgtagataattttt

SEQ ID NO: 66974 - DNA, 40 bp, Homo sapiens
aaaattatctacagattttggaatgtgaaaaactagtgtt

SEQ ID NO: 66975 - DNA, 40 bp, Homo sapiens
aacactagtttttcacattccaaaatctgtagataatttt

SEQ ID NO: 66976 - DNA, 40 bp, Homo sapiens
aaattatctacagattttggaatgtgaaaaactagtgttt

SEQ ID NO: 66977 - DNA, 40 bp, Homo sapiens
aaacactagtttttcacattccaaaatctgtagataattt

SEQ ID NO: 66978 - DNA, 40 bp, Homo sapiens
aattatctacagattttggaatgtgaaaaactagtgtttt

SEQ ID NO: 66979 - DNA, 40 bp, Homo sapiens
aaaacactagtttttcacattccaaaatctgtagataatt

SEQ ID NO: 66980 - DNA, 40 bp, Homo sapiens
attatctacagattttggaatgtgaaaaactagtgttttg

SEQ ID NO: 66981 - DNA, 40 bp, Homo sapiens
caaaacactagtttttcacattccaaaatctgtagataat

SEQ ID NO: 66982 - DNA, 40 bp, Homo sapiens
ttatctacagattttggaatgtgaaaaactagtgttttgt

SEQ ID NO: 66983 - DNA, 40 bp, Homo sapiens
acaaaacactagtttttcacattccaaaatctgtagataa

SEQ ID NO: 66984 - DNA, 40 bp, Homo sapiens
tatctacagattttggaatgtgaaaaactagtgttttgtt

SEQ ID NO: 66985 - DNA, 40 bp, Homo sapiens
aacaaaacactagtttttcacattccaaaatctgtagata

SEQ ID NO: 66986 - DNA, 40 bp, Homo sapiens
atctacagattttggaatgtgaaaaactagtgttttgttt

SEQ ID NO: 66987 - DNA, 40 bp, Homo sapiens
aaacaaaacactagtttttcacattccaaaatctgtagat

SEQ ID NO: 66988 - DNA, 40 bp, Homo sapiens
tctacagattttggaatgtgaaaaactagtgttttgtttc

SEQ ID NO: 66989 - DNA, 40 bp, Homo sapiens
gaaacaaaacactagtttttcacattccaaaatctgtaga

SEQ ID NO: 66990 - DNA, 40 bp, Homo sapiens
ctacagattttggaatgtgaaaaactagtgttttgtttca

SEQ ID NO: 66991 - DNA, 40 bp, Homo sapiens
tgaaacaaaacactagtttttcacattccaaaatctgtag

SEQ ID NO: 66992 - DNA, 40 bp, Homo sapiens
tacagattttggaatgtgaaaaactagtgttttgtttcat

SEQ ID NO: 66993 - DNA, 40 bp, Homo sapiens
atgaaacaaaacactagtttttcacattccaaaatctgta

SEQ ID NO: 66994 - DNA, 40 bp, Homo sapiens
acagattttggaatgtgaaaaactagtgttttgtttcata

SEQ ID NO: 66995 - DNA, 40 bp, Homo sapiens
tatgaaacaaaacactagtttttcacattccaaaatctgt

SEQ ID NO: 66996 - DNA, 40 bp, Homo sapiens
cagattttggaatgtgaaaaactagtgttttgtttcatag

SEQ ID NO: 66997 - DNA, 40 bp, Homo sapiens
ctatgaaacaaaacactagtttttcacattccaaaatctg

SEQ ID NO: 66998 - DNA, 40 bp, Homo sapiens
agattttggaatgtgaaaaactagtgttttgtttcatagg

SEQ ID NO: 66999 - DNA, 40 bp, Homo sapiens
cctatgaaacaaaacactagtttttcacattccaaaatct

SEQ ID NO: 67000 - DNA, 40 bp, Homo sapiens
gattttggaatgtgaaaaactagtgttttgtttcataggt

SEQ ID NO: 67001 - DNA, 40 bp, Homo sapiens
acctatgaaacaaaacactagtttttcacattccaaaatc

SEQ ID NO: 67002 - DNA, 40 bp, Homo sapiens
attttggaatgtgaaaaactagtgttttgtttcataggta

SEQ ID NO: 67003 - DNA, 40 bp, Homo sapiens
tacctatgaaacaaaacactagtttttcacattccaaaat

SEQ ID NO: 67004 - DNA, 40 bp, Homo sapiens
ttttggaatgtgaaaaactagtgttttgtttcataggtat

SEQ ID NO: 67005 - DNA, 40 bp, Homo sapiens
atacctatgaaacaaaacactagtttttcacattccaaaa

SEQ ID NO: 67006 - DNA, 40 bp, Homo sapiens
tttggaatgtgaaaaactagtgttttgtttcataggtata

SEQ ID NO: 67007 - DNA, 40 bp, Homo sapiens
tatacctatgaaacaaaacactagtttttcacattccaaa

SEQ ID NO: 67008 - DNA, 40 bp, Homo sapiens
ttggaatgtgaaaaactagtgttttgtttcataggtatat

SEQ ID NO: 67009 - DNA, 40 bp, Homo sapiens
atatacctatgaaacaaaacactagtttttcacattccaa

SEQ ID NO: 67010 - DNA, 40 bp, Homo sapiens
tggaatgtgaaaaactagtgttttgtttcataggtatata

SEQ ID NO: 67011 - DNA, 40 bp, Homo sapiens
tatatacctatgaaacaaaacactagtttttcacattcca

SEQ ID NO: 67012 - DNA, 40 bp, Homo sapiens
ggaatgtgaaaaactagtgttttgtttcataggtatatac

SEQ ID NO: 67013 - DNA, 40 bp, Homo sapiens
gtatatacctatgaaacaaaacactagtttttcacattcc

SEQ ID NO: 67014 - DNA, 40 bp, Homo sapiens
gaatgtgaaaaactagtgttttgtttcataggtatatact

SEQ ID NO: 67015 - DNA, 40 bp, Homo sapiens
agtatatacctatgaaacaaaacactagtttttcacattc

SEQ ID NO: 67016 - DNA, 40 bp, Homo sapiens
aatgtgaaaaactagtgttttgtttcataggtatatactg

SEQ ID NO: 67017 - DNA, 40 bp, Homo sapiens
cagtatatacctatgaaacaaaacactagtttttcacatt

SEQ ID NO: 67018 - DNA, 40 bp, Homo sapiens
atgtgaaaaactagtgttttgtttcataggtatatactgt

SEQ ID NO: 67019 - DNA, 40 bp, Homo sapiens
acagtatatacctatgaaacaaaacactagtttttcacat

SEQ ID NO: 67020 - DNA, 40 bp, Homo sapiens
tgtgaaaaactagtgttttgtttcataggtatatactgta

SEQ ID NO: 67021 - DNA, 40 bp, Homo sapiens
tacagtatatacctatgaaacaaaacactagtttttcaca

SEQ ID NO: 67022 - DNA, 40 bp, Homo sapiens
gtgaaaaactagtgttttgtttcataggtatatactgtag

SEQ ID NO: 67023 - DNA, 40 bp, Homo sapiens
ctacagtatatacctatgaaacaaaacactagtttttcac

SEQ ID NO: 67024 - DNA, 40 bp, Homo sapiens
tgaaaaactagtgttttgtttcataggtatatactgtagg

SEQ ID NO: 67025 - DNA, 40 bp, Homo sapiens
cctacagtatatacctatgaaacaaaacactagtttttca

SEQ ID NO: 67026 - DNA, 40 bp, Homo sapiens
gaaaaactagtgttttgtttcataggtatatactgtaggc

SEQ ID NO: 67027 - DNA, 40 bp, Homo sapiens
gcctacagtatatacctatgaaacaaaacactagtttttc

SEQ ID NO: 67028 - DNA, 40 bp, Homo sapiens
aaaaactagtgttttgtttcataggtatatactgtaggca

SEQ ID NO: 67029 - DNA, 40 bp, Homo sapiens
tgcctacagtatatacctatgaaacaaaacactagttttt

SEQ ID NO: 67030 - DNA, 40 bp, Homo sapiens
aaaactagtgttttgtttcataggtatatactgtaggcat

SEQ ID NO: 67031 - DNA, 40 bp, Homo sapiens
atgcctacagtatatacctatgaaacaaaacactagtttt

SEQ ID NO: 67032 - DNA, 40 bp, Homo sapiens
aaactagtgttttgtttcataggtatatactgtaggcatt

SEQ ID NO: 67033 - DNA, 40 bp, Homo sapiens
aatgcctacagtatatacctatgaaacaaaacactagttt

SEQ ID NO: 67034 - DNA, 40 bp, Homo sapiens
aactagtgttttgtttcataggtatatactgtaggcattt

SEQ ID NO: 67035 - DNA, 40 bp, Homo sapiens
aaatgcctacagtatatacctatgaaacaaaacactagtt

SEQ ID NO: 67036 - DNA, 40 bp, Homo sapiens
actagtgttttgtttcataggtatatactgtaggcatttt

SEQ ID NO: 67037 - DNA, 40 bp, Homo sapiens
aaaatgcctacagtatatacctatgaaacaaaacactagt

SEQ ID NO: 67038 - DNA, 40 bp, Homo sapiens
ctagtgttttgtttcataggtatatactgtaggcatttta

SEQ ID NO: 67039 - DNA, 40 bp, Homo sapiens
taaaatgcctacagtatatacctatgaaacaaaacactag

SEQ ID NO: 67040 - DNA, 40 bp, Homo sapiens
tagtgttttgtttcataggtatatactgtaggcattttaa

SEQ ID NO: 67041 - DNA, 40 bp, Homo sapiens
ttaaaatgcctacagtatatacctatgaaacaaaacacta

SEQ ID NO: 67042 - DNA, 40 bp, Homo sapiens
agtgttttgtttcataggtatatactgtaggcattttaaa

SEQ ID NO: 67043 - DNA, 40 bp, Homo sapiens
tttaaaatgcctacagtatatacctatgaaacaaaacact

SEQ ID NO: 67044 - DNA, 40 bp, Homo sapiens
gtgttttgtttcataggtatatactgtaggcattttaaaa

SEQ ID NO: 67045 - DNA, 40 bp, Homo sapiens
ttttaaaatgcctacagtatatacctatgaaacaaaacac

SEQ ID NO: 67046 - DNA, 40 bp, Homo sapiens
tgttttgtttcataggtatatactgtaggcattttaaaaa

SEQ ID NO: 67047 - DNA, 40 bp, Homo sapiens
tttttaaaatgcctacagtatatacctatgaaacaaaaca

SEQ ID NO: 67048 - DNA, 40 bp, Homo sapiens
gttttgtttcataggtatatactgtaggcattttaaaaat

SEQ ID NO: 67049 - DNA, 40 bp, Homo sapiens
atttttaaaatgcctacagtatatacctatgaaacaaaac

SEQ ID NO: 67050 - DNA, 40 bp, Homo sapiens
ttttgtttcataggtatatactgtaggcattttaaaaata

SEQ ID NO: 67051 - DNA, 40 bp, Homo sapiens
tatttttaaaatgcctacagtatatacctatgaaacaaaa

SEQ ID NO: 67052 - DNA, 40 bp, Homo sapiens
tttgtttcataggtatatactgtaggcattttaaaaataa

SEQ ID NO: 67053 - DNA, 40 bp, Homo sapiens
ttatttttaaaatgcctacagtatatacctatgaaacaaa

SEQ ID NO: 67054 - DNA, 40 bp, Homo sapiens
ttgtttcataggtatatactgtaggcattttaaaaataag

SEQ ID NO: 67055 - DNA, 40 bp, Homo sapiens
cttatttttaaaatgcctacagtatatacctatgaaacaa

SEQ ID NO: 67056 - DNA, 40 bp, Homo sapiens
tgtttcataggtatatactgtaggcattttaaaaataaga

SEQ ID NO: 67057 - DNA, 40 bp, Homo sapiens
tcttatttttaaaatgcctacagtatatacctatgaaaca

SEQ ID NO: 67058 - DNA, 40 bp, Homo sapiens
gtttcataggtatatactgtaggcattttaaaaataagag

SEQ ID NO: 67059 - DNA, 40 bp, Homo sapiens
ctcttatttttaaaatgcctacagtatatacctatgaaac

SEQ ID NO: 67060 - DNA, 40 bp, Homo sapiens
tttcataggtatatactgtaggcattttaaaaataagagc

SEQ ID NO: 67061 - DNA, 40 bp, Homo sapiens
gctcttatttttaaaatgcctacagtatatacctatgaaa

SEQ ID NO: 67062 - DNA, 40 bp, Homo sapiens
ttcataggtatatactgtaggcattttaaaaataagagcc

SEQ ID NO: 67063 - DNA, 40 bp, Homo sapiens
ggctcttatttttaaaatgcctacagtatatacctatgaa

SEQ ID NO: 67064 - DNA, 40 bp, Homo sapiens
tcataggtatatactgtaggcattttaaaaataagagcca

SEQ ID NO: 67065 - DNA, 40 bp, Homo sapiens
tggctcttatttttaaaatgcctacagtatatacctatga

SEQ ID NO: 67066 - DNA, 40 bp, Homo sapiens
cataggtatatactgtaggcattttaaaaataagagccag

SEQ ID NO: 67067 - DNA, 40 bp, Homo sapiens
ctggctcttatttttaaaatgcctacagtatatacctatg

SEQ ID NO: 67068 - DNA, 40 bp, Homo sapiens
ataggtatatactgtaggcattttaaaaataagagccagt

SEQ ID NO: 67069 - DNA, 40 bp, Homo sapiens
actggctcttatttttaaaatgcctacagtatatacctat

SEQ ID NO: 67070 - DNA, 40 bp, Homo sapiens
taggtatatactgtaggcattttaaaaataagagccagtg

SEQ ID NO: 67071 - DNA, 40 bp, Homo sapiens
cactggctcttatttttaaaatgcctacagtatataccta

SEQ ID NO: 67072 - DNA, 40 bp, Homo sapiens
aggtatatactgtaggcattttaaaaataagagccagtgc

SEQ ID NO: 67073 - DNA, 40 bp, Homo sapiens
gcactggctcttatttttaaaatgcctacagtatatacct

SEQ ID NO: 67074 - DNA, 40 bp, Homo sapiens
ggtatatactgtaggcattttaaaaataagagccagtgcc

SEQ ID NO: 67075 - DNA, 40 bp, Homo sapiens
ggcactggctcttatttttaaaatgcctacagtatatacc

SEQ ID NO: 67076 - DNA, 40 bp, Homo sapiens
gtatatactgtaggcattttaaaaataagagccagtgcca

SEQ ID NO: 67077 - DNA, 40 bp, Homo sapiens
tggcactggctcttatttttaaaatgcctacagtatatac

SEQ ID NO: 67078 - DNA, 40 bp, Homo sapiens
tatatactgtaggcattttaaaaataagagccagtgccag

SEQ ID NO: 67079 - DNA, 40 bp, Homo sapiens
ctggcactggctcttatttttaaaatgcctacagtatata

SEQ ID NO: 67080 - DNA, 40 bp, Homo sapiens
atatactgtaggcattttaaaaataagagccagtgccagt

SEQ ID NO: 67081 - DNA, 40 bp, Homo sapiens
actggcactggctcttatttttaaaatgcctacagtatat

SEQ ID NO: 67082 - DNA, 40 bp, Homo sapiens
tatactgtaggcattttaaaaataagagccagtgccagtg

SEQ ID NO: 67083 - DNA, 40 bp, Homo sapiens
cactggcactggctcttatttttaaaatgcctacagtata

SEQ ID NO: 67084 - DNA, 40 bp, Homo sapiens
atactgtaggcattttaaaaataagagccagtgccagtgg

SEQ ID NO: 67085 - DNA, 40 bp, Homo sapiens
ccactggcactggctcttatttttaaaatgcctacagtat

SEQ ID NO: 67086 - DNA, 40 bp, Homo sapiens
tactgtaggcattttaaaaataagagccagtgccagtggt

SEQ ID NO: 67087 - DNA, 40 bp, Homo sapiens
accactggcactggctcttatttttaaaatgcctacagta

SEQ ID NO: 67088 - DNA, 40 bp, Homo sapiens
actgtaggcattttaaaaataagagccagtgccagtggtt

SEQ ID NO: 67089 - DNA, 40 bp, Homo sapiens
aaccactggcactggctcttatttttaaaatgcctacagt

SEQ ID NO: 67090 - DNA, 40 bp, Homo sapiens
ctgtaggcattttaaaaataagagccagtgccagtggttt

SEQ ID NO: 67091 - DNA, 40 bp, Homo sapiens
aaaccactggcactggctcttatttttaaaatgcctacag

SEQ ID NO: 67092 - DNA, 40 bp, Homo sapiens
tgtaggcattttaaaaataagagccagtgccagtggttta

SEQ ID NO: 67093 - DNA, 40 bp, Homo sapiens
taaaccactggcactggctcttatttttaaaatgcctaca

SEQ ID NO: 67094 - DNA, 40 bp, Homo sapiens
gtaggcattttaaaaataagagccagtgccagtggtttac

SEQ ID NO: 67095 - DNA, 40 bp, Homo sapiens
gtaaaccactggcactggctcttatttttaaaatgcctac

SEQ ID NO: 67096 - DNA, 40 bp, Homo sapiens
taggcattttaaaaataagagccagtgccagtggtttaca

SEQ ID NO: 67097 - DNA, 40 bp, Homo sapiens
tgtaaaccactggcactggctcttatttttaaaatgccta

SEQ ID NO: 67098 - DNA, 40 bp, Homo sapiens
aggcattttaaaaataagagccagtgccagtggtttacag

SEQ ID NO: 67099 - DNA, 40 bp, Homo sapiens
ctgtaaaccactggcactggctcttatttttaaaatgcct

SEQ ID NO: 67100 - DNA, 40 bp, Homo sapiens
ggcattttaaaaataagagccagtgccagtggtttacagt

SEQ ID NO: 67101 - DNA, 40 bp, Homo sapiens
actgtaaaccactggcactggctcttatttttaaaatgcc

SEQ ID NO: 67102 - DNA, 40 bp, Homo sapiens
gcattttaaaaataagagccagtgccagtggtttacagtg

SEQ ID NO: 67103 - DNA, 40 bp, Homo sapiens
cactgtaaaccactggcactggctcttatttttaaaatgc

SEQ ID NO: 67104 - DNA, 40 bp, Homo sapiens
cattttaaaaataagagccagtgccagtggtttacagtgt

SEQ ID NO: 67105 - DNA, 40 bp, Homo sapiens
acactgtaaaccactggcactggctcttatttttaaaatg

SEQ ID NO: 67106 - DNA, 40 bp, Homo sapiens
attttaaaaataagagccagtgccagtggtttacagtgta

SEQ ID NO: 67107 - DNA, 40 bp, Homo sapiens
tacactgtaaaccactggcactggctcttatttttaaaat

SEQ ID NO: 67108 - DNA, 40 bp, Homo sapiens
ttttaaaaataagagccagtgccagtggtttacagtgtac

SEQ ID NO: 67109 - DNA, 40 bp, Homo sapiens
gtacactgtaaaccactggcactggctcttatttttaaaa

SEQ ID NO: 67110 - DNA, 40 bp, Homo sapiens
tttaaaaataagagccagtgccagtggtttacagtgtaca

SEQ ID NO: 67111 - DNA, 40 bp, Homo sapiens
tgtacactgtaaaccactggcactggctcttatttttaaa

SEQ ID NO: 67112 - DNA, 40 bp, Homo sapiens
ttaaaaataagagccagtgccagtggtttacagtgtacac

SEQ ID NO: 67113 - DNA, 40 bp, Homo sapiens
gtgtacactgtaaaccactggcactggctcttatttttaa

SEQ ID NO: 67114 - DNA, 40 bp, Homo sapiens
taaaaataagagccagtgccagtggtttacagtgtacaca

SEQ ID NO: 67115 - DNA, 40 bp, Homo sapiens
tgtgtacactgtaaaccactggcactggctcttattttta

SEQ ID NO: 67116 - DNA, 40 bp, Homo sapiens
aaaaataagagccagtgccagtggtttacagtgtacacaa

SEQ ID NO: 67117 - DNA, 40 bp, Homo sapiens
ttgtgtacactgtaaaccactggcactggctcttattttt

SEQ ID NO: 67118 - DNA, 40 bp, Homo sapiens
aaaataagagccagtgccagtggtttacagtgtacacaag

SEQ ID NO: 67119 - DNA, 40 bp, Homo sapiens
cttgtgtacactgtaaaccactggcactggctcttatttt

SEQ ID NO: 67120 - DNA, 40 bp, Homo sapiens
aaataagagccagtgccagtggtttacagtgtacacaagg

SEQ ID NO: 67121 - DNA, 40 bp, Homo sapiens
ccttgtgtacactgtaaaccactggcactggctcttattt

SEQ ID NO: 67122 - DNA, 40 bp, Homo sapiens
aataagagccagtgccagtggtttacagtgtacacaagga

SEQ ID NO: 67123 - DNA, 40 bp, Homo sapiens
tccttgtgtacactgtaaaccactggcactggctcttatt

SEQ ID NO: 67124 - DNA, 40 bp, Homo sapiens
ataagagccagtgccagtggtttacagtgtacacaaggat

SEQ ID NO: 67125 - DNA, 40 bp, Homo sapiens
atccttgtgtacactgtaaaccactggcactggctcttat

SEQ ID NO: 67126 - DNA, 40 bp, Homo sapiens
taagagccagtgccagtggtttacagtgtacacaaggata

SEQ ID NO: 67127 - DNA, 40 bp, Homo sapiens
tatccttgtgtacactgtaaaccactggcactggctctta

SEQ ID NO: 67128 - DNA, 40 bp, Homo sapiens
aagagccagtgccagtggtttacagtgtacacaaggataa

SEQ ID NO: 67129 - DNA, 40 bp, Homo sapiens
ttatccttgtgtacactgtaaaccactggcactggctctt

SEQ ID NO: 67130 - DNA, 40 bp, Homo sapiens
agagccagtgccagtggtttacagtgtacacaaggataat

SEQ ID NO: 67131 - DNA, 40 bp, Homo sapiens
attatccttgtgtacactgtaaaccactggcactggctct

SEQ ID NO: 67132 - DNA, 40 bp, Homo sapiens
gagccagtgccagtggtttacagtgtacacaaggataatg

SEQ ID NO: 67133 - DNA, 40 bp, Homo sapiens
cattatccttgtgtacactgtaaaccactggcactggctc

SEQ ID NO: 67134 - DNA, 40 bp, Homo sapiens
agccagtgccagtggtttacagtgtacacaaggataatgt

SEQ ID NO: 67135 - DNA, 40 bp, Homo sapiens
acattatccttgtgtacactgtaaaccactggcactggct

SEQ ID NO: 67136 - DNA, 40 bp, Homo sapiens
gccagtgccagtggtttacagtgtacacaaggataatgtt

SEQ ID NO: 67137 - DNA, 40 bp, Homo sapiens
aacattatccttgtgtacactgtaaaccactggcactggc

SEQ ID NO: 67138 - DNA, 40 bp, Homo sapiens
ccagtgccagtggtttacagtgtacacaaggataatgttc

SEQ ID NO: 67139 - DNA, 40 bp, Homo sapiens
gaacattatccttgtgtacactgtaaaccactggcactgg

SEQ ID NO: 67140 - DNA, 40 bp, Homo sapiens
cagtgccagtggtttacagtgtacacaaggataatgttct

SEQ ID NO: 67141 - DNA, 40 bp, Homo sapiens
agaacattatccttgtgtacactgtaaaccactggcactg

SEQ ID NO: 67142 - DNA, 40 bp, Homo sapiens
agtgccagtggtttacagtgtacacaaggataatgttctc

SEQ ID NO: 67143 - DNA, 40 bp, Homo sapiens
gagaacattatccttgtgtacactgtaaaccactggcact

SEQ ID NO: 67144 - DNA, 40 bp, Homo sapiens
gtgccagtggtttacagtgtacacaaggataatgttctca

SEQ ID NO: 67145 - DNA, 40 bp, Homo sapiens
tgagaacattatccttgtgtacactgtaaaccactggcac

SEQ ID NO: 67146 - DNA, 40 bp, Homo sapiens
tgccagtggtttacagtgtacacaaggataatgttctcat

SEQ ID NO: 67147 - DNA, 40 bp, Homo sapiens
atgagaacattatccttgtgtacactgtaaaccactggca

SEQ ID NO: 67148 - DNA, 40 bp, Homo sapiens
gccagtggtttacagtgtacacaaggataatgttctcatg

SEQ ID NO: 67149 - DNA, 40 bp, Homo sapiens
catgagaacattatccttgtgtacactgtaaaccactggc

SEQ ID NO: 67150 - DNA, 40 bp, Homo sapiens
ccagtggtttacagtgtacacaaggataatgttctcatgt

SEQ ID NO: 67151 - DNA, 40 bp, Homo sapiens
acatgagaacattatccttgtgtacactgtaaaccactgg

SEQ ID NO: 67152 - DNA, 40 bp, Homo sapiens
cagtggtttacagtgtacacaaggataatgttctcatgtt

SEQ ID NO: 67153 - DNA, 40 bp, Homo sapiens
aacatgagaacattatccttgtgtacactgtaaaccactg

SEQ ID NO: 67154 - DNA, 40 bp, Homo sapiens
agtggtttacagtgtacacaaggataatgttctcatgttc

SEQ ID NO: 67155 - DNA, 40 bp, Homo sapiens
gaacatgagaacattatccttgtgtacactgtaaaccact

SEQ ID NO: 67156 - DNA, 40 bp, Homo sapiens
gtggtttacagtgtacacaaggataatgttctcatgttct

SEQ ID NO: 67157 - DNA, 40 bp, Homo sapiens
agaacatgagaacattatccttgtgtacactgtaaaccac

SEQ ID NO: 67158 - DNA, 40 bp, Homo sapiens
tggtttacagtgtacacaaggataatgttctcatgttctc

SEQ ID NO: 67159 - DNA, 40 bp, Homo sapiens
gagaacatgagaacattatccttgtgtacactgtaaacca

SEQ ID NO: 67160 - DNA, 40 bp, Homo sapiens
ggtttacagtgtacacaaggataatgttctcatgttctct

SEQ ID NO: 67161 - DNA, 40 bp, Homo sapiens
agagaacatgagaacattatccttgtgtacactgtaaacc

SEQ ID NO: 67162 - DNA, 40 bp, Homo sapiens
gtttacagtgtacacaaggataatgttctcatgttctctt

SEQ ID NO: 67163 - DNA, 40 bp, Homo sapiens
aagagaacatgagaacattatccttgtgtacactgtaaac

SEQ ID NO: 67164 - DNA, 40 bp, Homo sapiens
tttacagtgtacacaaggataatgttctcatgttctcttg

SEQ ID NO: 67165 - DNA, 40 bp, Homo sapiens
caagagaacatgagaacattatccttgtgtacactgtaaa

SEQ ID NO: 67166 - DNA, 40 bp, Homo sapiens
ttacagtgtacacaaggataatgttctcatgttctcttga

SEQ ID NO: 67167 - DNA, 40 bp, Homo sapiens
tcaagagaacatgagaacattatccttgtgtacactgtaa

SEQ ID NO: 67168 - DNA, 40 bp, Homo sapiens
tacagtgtacacaaggataatgttctcatgttctcttgat

SEQ ID NO: 67169 - DNA, 40 bp, Homo sapiens
atcaagagaacatgagaacattatccttgtgtacactgta

SEQ ID NO: 67170 - DNA, 40 bp, Homo sapiens
acagtgtacacaaggataatgttctcatgttctcttgatg

SEQ ID NO: 67171 - DNA, 40 bp, Homo sapiens
catcaagagaacatgagaacattatccttgtgtacactgt

SEQ ID NO: 67172 - DNA, 40 bp, Homo sapiens
cagtgtacacaaggataatgttctcatgttctcttgatgt

SEQ ID NO: 67173 - DNA, 40 bp, Homo sapiens
acatcaagagaacatgagaacattatccttgtgtacactg

SEQ ID NO: 67174 - DNA, 40 bp, Homo sapiens
agtgtacacaaggataatgttctcatgttctcttgatgtc

SEQ ID NO: 67175 - DNA, 40 bp, Homo sapiens
gacatcaagagaacatgagaacattatccttgtgtacact

SEQ ID NO: 67176 - DNA, 40 bp, Homo sapiens
gtgtacacaaggataatgttctcatgttctcttgatgtca

SEQ ID NO: 67177 - DNA, 40 bp, Homo sapiens
tgacatcaagagaacatgagaacattatccttgtgtacac

SEQ ID NO: 67178 - DNA, 40 bp, Homo sapiens
tgtacacaaggataatgttctcatgttctcttgatgtcag

SEQ ID NO: 67179 - DNA, 40 bp, Homo sapiens
ctgacatcaagagaacatgagaacattatccttgtgtaca

SEQ ID NO: 67180 - DNA, 40 bp, Homo sapiens
gtacacaaggataatgttctcatgttctcttgatgtcagt

SEQ ID NO: 67181 - DNA, 40 bp, Homo sapiens
actgacatcaagagaacatgagaacattatccttgtgtac

SEQ ID NO: 67182 - DNA, 40 bp, Homo sapiens
tacacaaggataatgttctcatgttctcttgatgtcagta

SEQ ID NO: 67183 - DNA, 40 bp, Homo sapiens
tactgacatcaagagaacatgagaacattatccttgtgta

SEQ ID NO: 67184 - DNA, 40 bp, Homo sapiens
acacaaggataatgttctcatgttctcttgatgtcagtat

SEQ ID NO: 67185 - DNA, 40 bp, Homo sapiens
atactgacatcaagagaacatgagaacattatccttgtgt

SEQ ID NO: 67186 - DNA, 40 bp, Homo sapiens
cacaaggataatgttctcatgttctcttgatgtcagtatg

SEQ ID NO: 67187 - DNA, 40 bp, Homo sapiens
catactgacatcaagagaacatgagaacattatccttgtg

SEQ ID NO: 67188 - DNA, 40 bp, Homo sapiens
acaaggataatgttctcatgttctcttgatgtcagtatga

SEQ ID NO: 67189 - DNA, 40 bp, Homo sapiens
tcatactgacatcaagagaacatgagaacattatccttgt

SEQ ID NO: 67190 - DNA, 40 bp, Homo sapiens
caaggataatgttctcatgttctcttgatgtcagtatgac

SEQ ID NO: 67191 - DNA, 40 bp, Homo sapiens
gtcatactgacatcaagagaacatgagaacattatccttg

SEQ ID NO: 67192 - DNA, 40 bp, Homo sapiens
aaggataatgttctcatgttctcttgatgtcagtatgact

SEQ ID NO: 67193 - DNA, 40 bp, Homo sapiens
agtcatactgacatcaagagaacatgagaacattatcctt

SEQ ID NO: 67194 - DNA, 40 bp, Homo sapiens
aggataatgttctcatgttctcttgatgtcagtatgactt

SEQ ID NO: 67195 - DNA, 40 bp, Homo sapiens
aagtcatactgacatcaagagaacatgagaacattatcct

SEQ ID NO: 67196 - DNA, 40 bp, Homo sapiens
ggataatgttctcatgttctcttgatgtcagtatgacttt

SEQ ID NO: 67197 - DNA, 40 bp, Homo sapiens
aaagtcatactgacatcaagagaacatgagaacattatcc

SEQ ID NO: 67198 - DNA, 40 bp, Homo sapiens
gataatgttctcatgttctcttgatgtcagtatgacttta

SEQ ID NO: 67199 - DNA, 40 bp, Homo sapiens
taaagtcatactgacatcaagagaacatgagaacattatc

SEQ ID NO: 67200 - DNA, 40 bp, Homo sapiens
ataatgttctcatgttctcttgatgtcagtatgactttaa

SEQ ID NO: 67201 - DNA, 40 bp, Homo sapiens
ttaaagtcatactgacatcaagagaacatgagaacattat

SEQ ID NO: 67202 - DNA, 40 bp, Homo sapiens
taatgttctcatgttctcttgatgtcagtatgactttaaa

SEQ ID NO: 67203 - DNA, 40 bp, Homo sapiens
tttaaagtcatactgacatcaagagaacatgagaacatta

SEQ ID NO: 67204 - DNA, 40 bp, Homo sapiens
aatgttctcatgttctcttgatgtcagtatgactttaaag

SEQ ID NO: 67205 - DNA, 40 bp, Homo sapiens
ctttaaagtcatactgacatcaagagaacatgagaacatt

SEQ ID NO: 67206 - DNA, 40 bp, Homo sapiens
atgttctcatgttctcttgatgtcagtatgactttaaagc

SEQ ID NO: 67207 - DNA, 40 bp, Homo sapiens
gctttaaagtcatactgacatcaagagaacatgagaacat

SEQ ID NO: 67208 - DNA, 40 bp, Homo sapiens
tgttctcatgttctcttgatgtcagtatgactttaaagca

SEQ ID NO: 67209 - DNA, 40 bp, Homo sapiens
tgctttaaagtcatactgacatcaagagaacatgagaaca

SEQ ID NO: 67210 - DNA, 40 bp, Homo sapiens
gttctcatgttctcttgatgtcagtatgactttaaagcat

SEQ ID NO: 67211 - DNA, 40 bp, Homo sapiens
atgctttaaagtcatactgacatcaagagaacatgagaac

SEQ ID NO: 67212 - DNA, 40 bp, Homo sapiens
ttctcatgttctcttgatgtcagtatgactttaaagcata

SEQ ID NO: 67213 - DNA, 40 bp, Homo sapiens
tatgctttaaagtcatactgacatcaagagaacatgagaa

SEQ ID NO: 67214 - DNA, 40 bp, Homo sapiens
tctcatgttctcttgatgtcagtatgactttaaagcatat

SEQ ID NO: 67215 - DNA, 40 bp, Homo sapiens
atatgctttaaagtcatactgacatcaagagaacatgaga

SEQ ID NO: 67216 - DNA, 40 bp, Homo sapiens
ctcatgttctcttgatgtcagtatgactttaaagcatatt

SEQ ID NO: 67217 - DNA, 40 bp, Homo sapiens
aatatgctttaaagtcatactgacatcaagagaacatgag

SEQ ID NO: 67218 - DNA, 40 bp, Homo sapiens
tcatgttctcttgatgtcagtatgactttaaagcatatta

SEQ ID NO: 67219 - DNA, 40 bp, Homo sapiens
taatatgctttaaagtcatactgacatcaagagaacatga

SEQ ID NO: 67220 - DNA, 40 bp, Homo sapiens
catgttctcttgatgtcagtatgactttaaagcatattat

SEQ ID NO: 67221 - DNA, 40 bp, Homo sapiens
ataatatgctttaaagtcatactgacatcaagagaacatg

SEQ ID NO: 67222 - DNA, 40 bp, Homo sapiens
atgttctcttgatgtcagtatgactttaaagcatattatc

SEQ ID NO: 67223 - DNA, 40 bp, Homo sapiens
gataatatgctttaaagtcatactgacatcaagagaacat

SEQ ID NO: 67224 - DNA, 40 bp, Homo sapiens
tgttctcttgatgtcagtatgactttaaagcatattatca

SEQ ID NO: 67225 - DNA, 40 bp, Homo sapiens
tgataatatgctttaaagtcatactgacatcaagagaaca

SEQ ID NO: 67226 - DNA, 40 bp, Homo sapiens
gttctcttgatgtcagtatgactttaaagcatattatcaa

SEQ ID NO: 67227 - DNA, 40 bp, Homo sapiens
ttgataatatgctttaaagtcatactgacatcaagagaac

SEQ ID NO: 67228 - DNA, 40 bp, Homo sapiens
ttctcttgatgtcagtatgactttaaagcatattatcaag

SEQ ID NO: 67229 - DNA, 40 bp, Homo sapiens
cttgataatatgctttaaagtcatactgacatcaagagaa

SEQ ID NO: 67230 - DNA, 40 bp, Homo sapiens
tctcttgatgtcagtatgactttaaagcatattatcaaga

SEQ ID NO: 67231 - DNA, 40 bp, Homo sapiens
tcttgataatatgctttaaagtcatactgacatcaagaga

SEQ ID NO: 67232 - DNA, 40 bp, Homo sapiens
ctcttgatgtcagtatgactttaaagcatattatcaagaa

SEQ ID NO: 67233 - DNA, 40 bp, Homo sapiens
ttcttgataatatgctttaaagtcatactgacatcaagag

SEQ ID NO: 67234 - DNA, 40 bp, Homo sapiens
tcttgatgtcagtatgactttaaagcatattatcaagaaa

SEQ ID NO: 67235 - DNA, 40 bp, Homo sapiens
tttcttgataatatgctttaaagtcatactgacatcaaga

SEQ ID NO: 67236 - DNA, 40 bp, Homo sapiens
cttgatgtcagtatgactttaaagcatattatcaagaaat

SEQ ID NO: 67237 - DNA, 40 bp, Homo sapiens
atttcttgataatatgctttaaagtcatactgacatcaag

SEQ ID NO: 67238 - DNA, 40 bp, Homo sapiens
ttgatgtcagtatgactttaaagcatattatcaagaaata

SEQ ID NO: 67239 - DNA, 40 bp, Homo sapiens
tatttcttgataatatgctttaaagtcatactgacatcaa

SEQ ID NO: 67240 - DNA, 40 bp, Homo sapiens
tgatgtcagtatgactttaaagcatattatcaagaaataa

SEQ ID NO: 67241 - DNA, 40 bp, Homo sapiens
ttatttcttgataatatgctttaaagtcatactgacatca

SEQ ID NO: 67242 - DNA, 40 bp, Homo sapiens
gatgtcagtatgactttaaagcatattatcaagaaataac

SEQ ID NO: 67243 - DNA, 40 bp, Homo sapiens
gttatttcttgataatatgctttaaagtcatactgacatc

SEQ ID NO: 67244 - DNA, 40 bp, Homo sapiens
atgtcagtatgactttaaagcatattatcaagaaataact

SEQ ID NO: 67245 - DNA, 40 bp, Homo sapiens
agttatttcttgataatatgctttaaagtcatactgacat

SEQ ID NO: 67246 - DNA, 40 bp, Homo sapiens
tgtcagtatgactttaaagcatattatcaagaaataacta

SEQ ID NO: 67247 - DNA, 40 bp, Homo sapiens
tagttatttcttgataatatgctttaaagtcatactgaca

SEQ ID NO: 67248 - DNA, 40 bp, Homo sapiens
gtcagtatgactttaaagcatattatcaagaaataactaa

SEQ ID NO: 67249 - DNA, 40 bp, Homo sapiens
ttagttatttcttgataatatgctttaaagtcatactgac

SEQ ID NO: 67250 - DNA, 40 bp, Homo sapiens
tcagtatgactttaaagcatattatcaagaaataactaag

SEQ ID NO: 67251 - DNA, 40 bp, Homo sapiens
cttagttatttcttgataatatgctttaaagtcatactga

SEQ ID NO: 67252 - DNA, 40 bp, Homo sapiens
cagtatgactttaaagcatattatcaagaaataactaagt

SEQ ID NO: 67253 - DNA, 40 bp, Homo sapiens
acttagttatttcttgataatatgctttaaagtcatactg

SEQ ID NO: 67254 - DNA, 40 bp, Homo sapiens
agtatgactttaaagcatattatcaagaaataactaagtc

SEQ ID NO: 67255 - DNA, 40 bp, Homo sapiens
gacttagttatttcttgataatatgctttaaagtcatact

SEQ ID NO: 67256 - DNA, 40 bp, Homo sapiens
gtatgactttaaagcatattatcaagaaataactaagtct

SEQ ID NO: 67257 - DNA, 40 bp, Homo sapiens
agacttagttatttcttgataatatgctttaaagtcatac

SEQ ID NO: 67258 - DNA, 40 bp, Homo sapiens
tatgactttaaagcatattatcaagaaataactaagtctg

SEQ ID NO: 67259 - DNA, 40 bp, Homo sapiens
cagacttagttatttcttgataatatgctttaaagtcata

SEQ ID NO: 67260 - DNA, 40 bp, Homo sapiens
atgactttaaagcatattatcaagaaataactaagtctga

SEQ ID NO: 67261 - DNA, 40 bp, Homo sapiens
tcagacttagttatttcttgataatatgctttaaagtcat

SEQ ID NO: 67262 - DNA, 40 bp, Homo sapiens
tgactttaaagcatattatcaagaaataactaagtctgaa

SEQ ID NO: 67263 - DNA, 40 bp, Homo sapiens
ttcagacttagttatttcttgataatatgctttaaagtca

SEQ ID NO: 67264 - DNA, 40 bp, Homo sapiens
gactttaaagcatattatcaagaaataactaagtctgaaa

SEQ ID NO: 67265 - DNA, 40 bp, Homo sapiens
tttcagacttagttatttcttgataatatgctttaaagtc

SEQ ID NO: 67266 - DNA, 40 bp, Homo sapiens
actttaaagcatattatcaagaaataactaagtctgaaaa

SEQ ID NO: 67267 - DNA, 40 bp, Homo sapiens
ttttcagacttagttatttcttgataatatgctttaaagt

SEQ ID NO: 67268 - DNA, 40 bp, Homo sapiens
ctttaaagcatattatcaagaaataactaagtctgaaaaa

SEQ ID NO: 67269 - DNA, 40 bp, Homo sapiens
tttttcagacttagttatttcttgataatatgctttaaag

SEQ ID NO: 67270 - DNA, 40 bp, Homo sapiens
tttaaagcatattatcaagaaataactaagtctgaaaaac

SEQ ID NO: 67271 - DNA, 40 bp, Homo sapiens
gtttttcagacttagttatttcttgataatatgctttaaa

SEQ ID NO: 67272 - DNA, 40 bp, Homo sapiens
ttaaagcatattatcaagaaataactaagtctgaaaaact

SEQ ID NO: 67273 - DNA, 40 bp, Homo sapiens
agtttttcagacttagttatttcttgataatatgctttaa

SEQ ID NO: 67274 - DNA, 40 bp, Homo sapiens
taaagcatattatcaagaaataactaagtctgaaaaactg

SEQ ID NO: 67275 - DNA, 40 bp, Homo sapiens
cagtttttcagacttagttatttcttgataatatgcttta

SEQ ID NO: 67276 - DNA, 40 bp, Homo sapiens
aaagcatattatcaagaaataactaagtctgaaaaactgt

SEQ ID NO: 67277 - DNA, 40 bp, Homo sapiens
acagtttttcagacttagttatttcttgataatatgcttt

SEQ ID NO: 67278 - DNA, 40 bp, Homo sapiens
aagcatattatcaagaaataactaagtctgaaaaactgtg

SEQ ID NO: 67279 - DNA, 40 bp, Homo sapiens
cacagtttttcagacttagttatttcttgataatatgctt

SEQ ID NO: 67280 - DNA, 40 bp, Homo sapiens
agcatattatcaagaaataactaagtctgaaaaactgtgg

SEQ ID NO: 67281 - DNA, 40 bp, Homo sapiens
ccacagtttttcagacttagttatttcttgataatatgct

SEQ ID NO: 67282 - DNA, 40 bp, Homo sapiens
gcatattatcaagaaataactaagtctgaaaaactgtggt

SEQ ID NO: 67283 - DNA, 40 bp, Homo sapiens
accacagtttttcagacttagttatttcttgataatatgc

SEQ ID NO: 67284 - DNA, 40 bp, Homo sapiens
catattatcaagaaataactaagtctgaaaaactgtggta

SEQ ID NO: 67285 - DNA, 40 bp, Homo sapiens
taccacagtttttcagacttagttatttcttgataatatg

SEQ ID NO: 67286 - DNA, 40 bp, Homo sapiens
atattatcaagaaataactaagtctgaaaaactgtggtaa

SEQ ID NO: 67287 - DNA, 40 bp, Homo sapiens
ttaccacagtttttcagacttagttatttcttgataatat

SEQ ID NO: 67288 - DNA, 40 bp, Homo sapiens
tattatcaagaaataactaagtctgaaaaactgtggtaaa

SEQ ID NO: 67289 - DNA, 40 bp, Homo sapiens
tttaccacagtttttcagacttagttatttcttgataata

SEQ ID NO: 67290 - DNA, 40 bp, Homo sapiens
attatcaagaaataactaagtctgaaaaactgtggtaaat

SEQ ID NO: 67291 - DNA, 40 bp, Homo sapiens
atttaccacagtttttcagacttagttatttcttgataat

SEQ ID NO: 67292 - DNA, 40 bp, Homo sapiens
ttatcaagaaataactaagtctgaaaaactgtggtaaata

SEQ ID NO: 67293 - DNA, 40 bp, Homo sapiens
tatttaccacagtttttcagacttagttatttcttgataa

SEQ ID NO: 67294 - DNA, 40 bp, Homo sapiens
tatcaagaaataactaagtctgaaaaactgtggtaaataa

SEQ ID NO: 67295 - DNA, 40 bp, Homo sapiens
ttatttaccacagtttttcagacttagttatttcttgata

SEQ ID NO: 67296 - DNA, 40 bp, Homo sapiens
atcaagaaataactaagtctgaaaaactgtggtaaataac

SEQ ID NO: 67297 - DNA, 40 bp, Homo sapiens
gttatttaccacagtttttcagacttagttatttcttgat

SEQ ID NO: 67298 - DNA, 40 bp, Homo sapiens
tcaagaaataactaagtctgaaaaactgtggtaaataact

SEQ ID NO: 67299 - DNA, 40 bp, Homo sapiens
agttatttaccacagtttttcagacttagttatttcttga

SEQ ID NO: 67300 - DNA, 40 bp, Homo sapiens
caagaaataactaagtctgaaaaactgtggtaaataactg

SEQ ID NO: 67301 - DNA, 40 bp, Homo sapiens
cagttatttaccacagtttttcagacttagttatttcttg

SEQ ID NO: 67302 - DNA, 40 bp, Homo sapiens
aagaaataactaagtctgaaaaactgtggtaaataactgg

SEQ ID NO: 67303 - DNA, 40 bp, Homo sapiens
ccagttatttaccacagtttttcagacttagttatttctt

SEQ ID NO: 67304 - DNA, 40 bp, Homo sapiens
agaaataactaagtctgaaaaactgtggtaaataactggt

SEQ ID NO: 67305 - DNA, 40 bp, Homo sapiens
accagttatttaccacagtttttcagacttagttatttct

SEQ ID NO: 67306 - DNA, 40 bp, Homo sapiens
gaaataactaagtctgaaaaactgtggtaaataactggta

SEQ ID NO: 67307 - DNA, 40 bp, Homo sapiens
taccagttatttaccacagtttttcagacttagttatttc

SEQ ID NO: 67308 - DNA, 40 bp, Homo sapiens
aaataactaagtctgaaaaactgtggtaaataactggtac

SEQ ID NO: 67309 - DNA, 40 bp, Homo sapiens
gtaccagttatttaccacagtttttcagacttagttattt

SEQ ID NO: 67310 - DNA, 40 bp, Homo sapiens
aataactaagtctgaaaaactgtggtaaataactggtact

SEQ ID NO: 67311 - DNA, 40 bp, Homo sapiens
agtaccagttatttaccacagtttttcagacttagttatt

SEQ ID NO: 67312 - DNA, 40 bp, Homo sapiens
ataactaagtctgaaaaactgtggtaaataactggtactc

SEQ ID NO: 67313 - DNA, 40 bp, Homo sapiens
gagtaccagttatttaccacagtttttcagacttagttat

SEQ ID NO: 67314 - DNA, 40 bp, Homo sapiens
taactaagtctgaaaaactgtggtaaataactggtactct

SEQ ID NO: 67315 - DNA, 40 bp, Homo sapiens
agagtaccagttatttaccacagtttttcagacttagtta

SEQ ID NO: 67316 - DNA, 40 bp, Homo sapiens
aactaagtctgaaaaactgtggtaaataactggtactcta

SEQ ID NO: 67317 - DNA, 40 bp, Homo sapiens
tagagtaccagttatttaccacagtttttcagacttagtt

SEQ ID NO: 67318 - DNA, 40 bp, Homo sapiens
actaagtctgaaaaactgtggtaaataactggtactctaa

SEQ ID NO: 67319 - DNA, 40 bp, Homo sapiens
ttagagtaccagttatttaccacagtttttcagacttagt

SEQ ID NO: 67320 - DNA, 40 bp, Homo sapiens
ctaagtctgaaaaactgtggtaaataactggtactctaaa

SEQ ID NO: 67321 - DNA, 40 bp, Homo sapiens
tttagagtaccagttatttaccacagtttttcagacttag

SEQ ID NO: 67322 - DNA, 40 bp, Homo sapiens
taagtctgaaaaactgtggtaaataactggtactctaaaa

SEQ ID NO: 67323 - DNA, 40 bp, Homo sapiens
ttttagagtaccagttatttaccacagtttttcagactta

SEQ ID NO: 67324 - DNA, 40 bp, Homo sapiens
aagtctgaaaaactgtggtaaataactggtactctaaaac

SEQ ID NO: 67325 - DNA, 40 bp, Homo sapiens
gttttagagtaccagttatttaccacagtttttcagactt

SEQ ID NO: 67326 - DNA, 40 bp, Homo sapiens
agtctgaaaaactgtggtaaataactggtactctaaaacc

SEQ ID NO: 67327 - DNA, 40 bp, Homo sapiens
ggttttagagtaccagttatttaccacagtttttcagact

SEQ ID NO: 67328 - DNA, 40 bp, Homo sapiens
gtctgaaaaactgtggtaaataactggtactctaaaacct

SEQ ID NO: 67329 - DNA, 40 bp, Homo sapiens
aggttttagagtaccagttatttaccacagtttttcagac

SEQ ID NO: 67330 - DNA, 40 bp, Homo sapiens
tctgaaaaactgtggtaaataactggtactctaaaaccta

SEQ ID NO: 67331 - DNA, 40 bp, Homo sapiens
taggttttagagtaccagttatttaccacagtttttcaga

SEQ ID NO: 67332 - DNA, 40 bp, Homo sapiens
ctgaaaaactgtggtaaataactggtactctaaaacctaa

SEQ ID NO: 67333 - DNA, 40 bp, Homo sapiens
ttaggttttagagtaccagttatttaccacagtttttcag

SEQ ID NO: 67334 - DNA, 40 bp, Homo sapiens
tgaaaaactgtggtaaataactggtactctaaaacctaag

SEQ ID NO: 67335 - DNA, 40 bp, Homo sapiens
cttaggttttagagtaccagttatttaccacagtttttca

SEQ ID NO: 67336 - DNA, 40 bp, Homo sapiens
gaaaaactgtggtaaataactggtactctaaaacctaagt

SEQ ID NO: 67337 - DNA, 40 bp, Homo sapiens
acttaggttttagagtaccagttatttaccacagtttttc

SEQ ID NO: 67338 - DNA, 40 bp, Homo sapiens
aaaaactgtggtaaataactggtactctaaaacctaagtt

SEQ ID NO: 67339 - DNA, 40 bp, Homo sapiens
aacttaggttttagagtaccagttatttaccacagttttt

SEQ ID NO: 67340 - DNA, 40 bp, Homo sapiens
aaaactgtggtaaataactggtactctaaaacctaagttt

SEQ ID NO: 67341 - DNA, 40 bp, Homo sapiens
aaacttaggttttagagtaccagttatttaccacagtttt

SEQ ID NO: 67342 - DNA, 40 bp, Homo sapiens
aaactgtggtaaataactggtactctaaaacctaagtttc

SEQ ID NO: 67343 - DNA, 40 bp, Homo sapiens
gaaacttaggttttagagtaccagttatttaccacagttt

SEQ ID NO: 67344 - DNA, 40 bp, Homo sapiens
aactgtggtaaataactggtactctaaaacctaagtttct

SEQ ID NO: 67345 - DNA, 40 bp, Homo sapiens
agaaacttaggttttagagtaccagttatttaccacagtt

SEQ ID NO: 67346 - DNA, 40 bp, Homo sapiens
actgtggtaaataactggtactctaaaacctaagtttctt

SEQ ID NO: 67347 - DNA, 40 bp, Homo sapiens
aagaaacttaggttttagagtaccagttatttaccacagt

SEQ ID NO: 67348 - DNA, 40 bp, Homo sapiens
ctgtggtaaataactggtactctaaaacctaagtttctta

SEQ ID NO: 67349 - DNA, 40 bp, Homo sapiens
taagaaacttaggttttagagtaccagttatttaccacag

SEQ ID NO: 67350 - DNA, 40 bp, Homo sapiens
tgtggtaaataactggtactctaaaacctaagtttcttat

SEQ ID NO: 67351 - DNA, 40 bp, Homo sapiens
ataagaaacttaggttttagagtaccagttatttaccaca

SEQ ID NO: 67352 - DNA, 40 bp, Homo sapiens
gtggtaaataactggtactctaaaacctaagtttcttatt

SEQ ID NO: 67353 - DNA, 40 bp, Homo sapiens
aataagaaacttaggttttagagtaccagttatttaccac

SEQ ID NO: 67354 - DNA, 40 bp, Homo sapiens
tggtaaataactggtactctaaaacctaagtttcttatta

SEQ ID NO: 67355 - DNA, 40 bp, Homo sapiens
taataagaaacttaggttttagagtaccagttatttacca

SEQ ID NO: 67356 - DNA, 40 bp, Homo sapiens
ggtaaataactggtactctaaaacctaagtttcttattac

SEQ ID NO: 67357 - DNA, 40 bp, Homo sapiens
gtaataagaaacttaggttttagagtaccagttatttacc

SEQ ID NO: 67358 - DNA, 40 bp, Homo sapiens
gtaaataactggtactctaaaacctaagtttcttattact

SEQ ID NO: 67359 - DNA, 40 bp, Homo sapiens
agtaataagaaacttaggttttagagtaccagttatttac

SEQ ID NO: 67360 - DNA, 40 bp, Homo sapiens
taaataactggtactctaaaacctaagtttcttattacta

SEQ ID NO: 67361 - DNA, 40 bp, Homo sapiens
tagtaataagaaacttaggttttagagtaccagttattta

SEQ ID NO: 67362 - DNA, 40 bp, Homo sapiens
aaataactggtactctaaaacctaagtttcttattactaa

SEQ ID NO: 67363 - DNA, 40 bp, Homo sapiens
ttagtaataagaaacttaggttttagagtaccagttattt

SEQ ID NO: 67364 - DNA, 40 bp, Homo sapiens
aataactggtactctaaaacctaagtttcttattactaaa

SEQ ID NO: 67365 - DNA, 40 bp, Homo sapiens
tttagtaataagaaacttaggttttagagtaccagttatt

SEQ ID NO: 67366 - DNA, 40 bp, Homo sapiens
ataactggtactctaaaacctaagtttcttattactaaaa

SEQ ID NO: 67367 - DNA, 40 bp, Homo sapiens
ttttagtaataagaaacttaggttttagagtaccagttat

SEQ ID NO: 67368 - DNA, 40 bp, Homo sapiens
taactggtactctaaaacctaagtttcttattactaaaaa

SEQ ID NO: 67369 - DNA, 40 bp, Homo sapiens
tttttagtaataagaaacttaggttttagagtaccagtta

SEQ ID NO: 67370 - DNA, 40 bp, Homo sapiens
aactggtactctaaaacctaagtttcttattactaaaaat

SEQ ID NO: 67371 - DNA, 40 bp, Homo sapiens
atttttagtaataagaaacttaggttttagagtaccagtt

SEQ ID NO: 67372 - DNA, 40 bp, Homo sapiens
actggtactctaaaacctaagtttcttattactaaaaata

SEQ ID NO: 67373 - DNA, 40 bp, Homo sapiens
tatttttagtaataagaaacttaggttttagagtaccagt

SEQ ID NO: 67374 - DNA, 40 bp, Homo sapiens
ctggtactctaaaacctaagtttcttattactaaaaataa

SEQ ID NO: 67375 - DNA, 40 bp, Homo sapiens
ttatttttagtaataagaaacttaggttttagagtaccag

SEQ ID NO: 67376 - DNA, 40 bp, Homo sapiens
tggtactctaaaacctaagtttcttattactaaaaataag

SEQ ID NO: 67377 - DNA, 40 bp, Homo sapiens
cttatttttagtaataagaaacttaggttttagagtacca

SEQ ID NO: 67378 - DNA, 40 bp, Homo sapiens
ggtactctaaaacctaagtttcttattactaaaaataaga

SEQ ID NO: 67379 - DNA, 40 bp, Homo sapiens
tcttatttttagtaataagaaacttaggttttagagtacc

SEQ ID NO: 67380 - DNA, 40 bp, Homo sapiens
gtactctaaaacctaagtttcttattactaaaaataagaa

SEQ ID NO: 67381 - DNA, 40 bp, Homo sapiens
ttcttatttttagtaataagaaacttaggttttagagtac

SEQ ID NO: 67382 - DNA, 40 bp, Homo sapiens
tactctaaaacctaagtttcttattactaaaaataagaaa

SEQ ID NO: 67383 - DNA, 40 bp, Homo sapiens
tttcttatttttagtaataagaaacttaggttttagagta

SEQ ID NO: 67384 - DNA, 40 bp, Homo sapiens
actctaaaacctaagtttcttattactaaaaataagaaat

SEQ ID NO: 67385 - DNA, 40 bp, Homo sapiens
atttcttatttttagtaataagaaacttaggttttagagt

SEQ ID NO: 67386 - DNA, 40 bp, Homo sapiens
ctctaaaacctaagtttcttattactaaaaataagaaatg

SEQ ID NO: 67387 - DNA, 40 bp, Homo sapiens
catttcttatttttagtaataagaaacttaggttttagag

SEQ ID NO: 67388 - DNA, 40 bp, Homo sapiens
tctaaaacctaagtttcttattactaaaaataagaaatgg

SEQ ID NO: 67389 - DNA, 40 bp, Homo sapiens
ccatttcttatttttagtaataagaaacttaggttttaga

SEQ ID NO: 67390 - DNA, 40 bp, Homo sapiens
ctaaaacctaagtttcttattactaaaaataagaaatggt

SEQ ID NO: 67391 - DNA, 40 bp, Homo sapiens
accatttcttatttttagtaataagaaacttaggttttag

SEQ ID NO: 67392 - DNA, 40 bp, Homo sapiens
taaaacctaagtttcttattactaaaaataagaaatggta

SEQ ID NO: 67393 - DNA, 40 bp, Homo sapiens
taccatttcttatttttagtaataagaaacttaggtttta

SEQ ID NO: 67394 - DNA, 40 bp, Homo sapiens
aaaacctaagtttcttattactaaaaataagaaatggtaa

SEQ ID NO: 67395 - DNA, 40 bp, Homo sapiens
ttaccatttcttatttttagtaataagaaacttaggtttt

SEQ ID NO: 67396 - DNA, 40 bp, Homo sapiens
aaacctaagtttcttattactaaaaataagaaatggtaaa

SEQ ID NO: 67397 - DNA, 40 bp, Homo sapiens
tttaccatttcttatttttagtaataagaaacttaggttt

SEQ ID NO: 67398 - DNA, 40 bp, Homo sapiens
aacctaagtttcttattactaaaaataagaaatggtaaaa

SEQ ID NO: 67399 - DNA, 40 bp, Homo sapiens
ttttaccatttcttatttttagtaataagaaacttaggtt

SEQ ID NO: 67400 - DNA, 40 bp, Homo sapiens
acctaagtttcttattactaaaaataagaaatggtaaaag

SEQ ID NO: 67401 - DNA, 40 bp, Homo sapiens
cttttaccatttcttatttttagtaataagaaacttaggt

SEQ ID NO: 67402 - DNA, 40 bp, Homo sapiens
cctaagtttcttattactaaaaataagaaatggtaaaagt

SEQ ID NO: 67403 - DNA, 40 bp, Homo sapiens
acttttaccatttcttatttttagtaataagaaacttagg

SEQ ID NO: 67404 - DNA, 40 bp, Homo sapiens
ctaagtttcttattactaaaaataagaaatggtaaaagtc

SEQ ID NO: 67405 - DNA, 40 bp, Homo sapiens
gacttttaccatttcttatttttagtaataagaaacttag

SEQ ID NO: 67406 - DNA, 40 bp, Homo sapiens
taagtttcttattactaaaaataagaaatggtaaaagtca

SEQ ID NO: 67407 - DNA, 40 bp, Homo sapiens
tgacttttaccatttcttatttttagtaataagaaactta

SEQ ID NO: 67408 - DNA, 40 bp, Homo sapiens
aagtttcttattactaaaaataagaaatggtaaaagtcac

SEQ ID NO: 67409 - DNA, 40 bp, Homo sapiens
gtgacttttaccatttcttatttttagtaataagaaactt

SEQ ID NO: 67410 - DNA, 40 bp, Homo sapiens
agtttcttattactaaaaataagaaatggtaaaagtcacc

SEQ ID NO: 67411 - DNA, 40 bp, Homo sapiens
ggtgacttttaccatttcttatttttagtaataagaaact

SEQ ID NO: 67412 - DNA, 40 bp, Homo sapiens
gtttcttattactaaaaataagaaatggtaaaagtcaccc

SEQ ID NO: 67413 - DNA, 40 bp, Homo sapiens
gggtgacttttaccatttcttatttttagtaataagaaac

SEQ ID NO: 67414 - DNA, 40 bp, Homo sapiens
tttcttattactaaaaataagaaatggtaaaagtcaccct

SEQ ID NO: 67415 - DNA, 40 bp, Homo sapiens
agggtgacttttaccatttcttatttttagtaataagaaa

SEQ ID NO: 67416 - DNA, 40 bp, Homo sapiens
ttcttattactaaaaataagaaatggtaaaagtcaccctg

SEQ ID NO: 67417 - DNA, 40 bp, Homo sapiens
cagggtgacttttaccatttcttatttttagtaataagaa

SEQ ID NO: 67418 - DNA, 40 bp, Homo sapiens
tcttattactaaaaataagaaatggtaaaagtcaccctgt

SEQ ID NO: 67419 - DNA, 40 bp, Homo sapiens
acagggtgacttttaccatttcttatttttagtaataaga

SEQ ID NO: 67420 - DNA, 40 bp, Homo sapiens
cttattactaaaaataagaaatggtaaaagtcaccctgtg

SEQ ID NO: 67421 - DNA, 40 bp, Homo sapiens
cacagggtgacttttaccatttcttatttttagtaataag

SEQ ID NO: 67422 - DNA, 40 bp, Homo sapiens
ttattactaaaaataagaaatggtaaaagtcaccctgtgc

SEQ ID NO: 67423 - DNA, 40 bp, Homo sapiens
gcacagggtgacttttaccatttcttatttttagtaataa

SEQ ID NO: 67424 - DNA, 40 bp, Homo sapiens
tattactaaaaataagaaatggtaaaagtcaccctgtgct

SEQ ID NO: 67425 - DNA, 40 bp, Homo sapiens
agcacagggtgacttttaccatttcttatttttagtaata

SEQ ID NO: 67426 - DNA, 40 bp, Homo sapiens
attactaaaaataagaaatggtaaaagtcaccctgtgctg

SEQ ID NO: 67427 - DNA, 40 bp, Homo sapiens
cagcacagggtgacttttaccatttcttatttttagtaat

SEQ ID NO: 67428 - DNA, 40 bp, Homo sapiens
ttactaaaaataagaaatggtaaaagtcaccctgtgctgt

SEQ ID NO: 67429 - DNA, 40 bp, Homo sapiens
acagcacagggtgacttttaccatttcttatttttagtaa

SEQ ID NO: 67430 - DNA, 40 bp, Homo sapiens
tactaaaaataagaaatggtaaaagtcaccctgtgctgtt

SEQ ID NO: 67431 - DNA, 40 bp, Homo sapiens
aacagcacagggtgacttttaccatttcttatttttagta

SEQ ID NO: 67432 - DNA, 40 bp, Homo sapiens
actaaaaataagaaatggtaaaagtcaccctgtgctgtta

SEQ ID NO: 67433 - DNA, 40 bp, Homo sapiens
taacagcacagggtgacttttaccatttcttatttttagt

SEQ ID NO: 67434 - DNA, 40 bp, Homo sapiens
ctaaaaataagaaatggtaaaagtcaccctgtgctgttaa

SEQ ID NO: 67435 - DNA, 40 bp, Homo sapiens
ttaacagcacagggtgacttttaccatttcttatttttag

SEQ ID NO: 67436 - DNA, 40 bp, Homo sapiens
taaaaataagaaatggtaaaagtcaccctgtgctgttaat

SEQ ID NO: 67437 - DNA, 40 bp, Homo sapiens
attaacagcacagggtgacttttaccatttcttattttta

SEQ ID NO: 67438 - DNA, 40 bp, Homo sapiens
aaaaataagaaatggtaaaagtcaccctgtgctgttaatt

SEQ ID NO: 67439 - DNA, 40 bp, Homo sapiens
aattaacagcacagggtgacttttaccatttcttattttt

SEQ ID NO: 67440 - DNA, 40 bp, Homo sapiens
aaaataagaaatggtaaaagtcaccctgtgctgttaatta

SEQ ID NO: 67441 - DNA, 40 bp, Homo sapiens
taattaacagcacagggtgacttttaccatttcttatttt

SEQ ID NO: 67442 - DNA, 40 bp, Homo sapiens
aaataagaaatggtaaaagtcaccctgtgctgttaattat

SEQ ID NO: 67443 - DNA, 40 bp, Homo sapiens
ataattaacagcacagggtgacttttaccatttcttattt

SEQ ID NO: 67444 - DNA, 40 bp, Homo sapiens
aataagaaatggtaaaagtcaccctgtgctgttaattata

SEQ ID NO: 67445 - DNA, 40 bp, Homo sapiens
tataattaacagcacagggtgacttttaccatttcttatt

SEQ ID NO: 67446 - DNA, 40 bp, Homo sapiens
ataagaaatggtaaaagtcaccctgtgctgttaattatat

SEQ ID NO: 67447 - DNA, 40 bp, Homo sapiens
atataattaacagcacagggtgacttttaccatttcttat

SEQ ID NO: 67448 - DNA, 40 bp, Homo sapiens
taagaaatggtaaaagtcaccctgtgctgttaattatatg

SEQ ID NO: 67449 - DNA, 40 bp, Homo sapiens
catataattaacagcacagggtgacttttaccatttctta

SEQ ID NO: 67450 - DNA, 40 bp, Homo sapiens
aagaaatggtaaaagtcaccctgtgctgttaattatatga

SEQ ID NO: 67451 - DNA, 40 bp, Homo sapiens
tcatataattaacagcacagggtgacttttaccatttctt

SEQ ID NO: 67452 - DNA, 40 bp, Homo sapiens
agaaatggtaaaagtcaccctgtgctgttaattatatgag

SEQ ID NO: 67453 - DNA, 40 bp, Homo sapiens
ctcatataattaacagcacagggtgacttttaccatttct

SEQ ID NO: 67454 - DNA, 40 bp, Homo sapiens
gaaatggtaaaagtcaccctgtgctgttaattatatgagc

SEQ ID NO: 67455 - DNA, 40 bp, Homo sapiens
gctcatataattaacagcacagggtgacttttaccatttc

SEQ ID NO: 67456 - DNA, 40 bp, Homo sapiens
aaatggtaaaagtcaccctgtgctgttaattatatgagcc

SEQ ID NO: 67457 - DNA, 40 bp, Homo sapiens
ggctcatataattaacagcacagggtgacttttaccattt

SEQ ID NO: 67458 - DNA, 40 bp, Homo sapiens
aatggtaaaagtcaccctgtgctgttaattatatgagcca

SEQ ID NO: 67459 - DNA, 40 bp, Homo sapiens
tggctcatataattaacagcacagggtgacttttaccatt

SEQ ID NO: 67460 - DNA, 40 bp, Homo sapiens
atggtaaaagtcaccctgtgctgttaattatatgagccac

SEQ ID NO: 67461 - DNA, 40 bp, Homo sapiens
gtggctcatataattaacagcacagggtgacttttaccat

SEQ ID NO: 67462 - DNA, 40 bp, Homo sapiens
tggtaaaagtcaccctgtgctgttaattatatgagccact

SEQ ID NO: 67463 - DNA, 40 bp, Homo sapiens
agtggctcatataattaacagcacagggtgacttttacca

SEQ ID NO: 67464 - DNA, 40 bp, Homo sapiens
ggtaaaagtcaccctgtgctgttaattatatgagccactg

SEQ ID NO: 67465 - DNA, 40 bp, Homo sapiens
cagtggctcatataattaacagcacagggtgacttttacc

SEQ ID NO: 67466 - DNA, 40 bp, Homo sapiens
gtaaaagtcaccctgtgctgttaattatatgagccactga

SEQ ID NO: 67467 - DNA, 40 bp, Homo sapiens
tcagtggctcatataattaacagcacagggtgacttttac

SEQ ID NO: 67468 - DNA, 40 bp, Homo sapiens
taaaagtcaccctgtgctgttaattatatgagccactgag

SEQ ID NO: 67469 - DNA, 40 bp, Homo sapiens
ctcagtggctcatataattaacagcacagggtgactttta

SEQ ID NO: 67470 - DNA, 40 bp, Homo sapiens
aaaagtcaccctgtgctgttaattatatgagccactgagg

SEQ ID NO: 67471 - DNA, 40 bp, Homo sapiens
cctcagtggctcatataattaacagcacagggtgactttt

SEQ ID NO: 67472 - DNA, 40 bp, Homo sapiens
aaagtcaccctgtgctgttaattatatgagccactgaggt

SEQ ID NO: 67473 - DNA, 40 bp, Homo sapiens
acctcagtggctcatataattaacagcacagggtgacttt

SEQ ID NO: 67474 - DNA, 40 bp, Homo sapiens
aagtcaccctgtgctgttaattatatgagccactgaggtc

SEQ ID NO: 67475 - DNA, 40 bp, Homo sapiens
gacctcagtggctcatataattaacagcacagggtgactt

SEQ ID NO: 67476 - DNA, 40 bp, Homo sapiens
agtcaccctgtgctgttaattatatgagccactgaggtcc

SEQ ID NO: 67477 - DNA, 40 bp, Homo sapiens
ggacctcagtggctcatataattaacagcacagggtgact

SEQ ID NO: 67478 - DNA, 40 bp, Homo sapiens
gtcaccctgtgctgttaattatatgagccactgaggtcct

SEQ ID NO: 67479 - DNA, 40 bp, Homo sapiens
aggacctcagtggctcatataattaacagcacagggtgac

SEQ ID NO: 67480 - DNA, 40 bp, Homo sapiens
tcaccctgtgctgttaattatatgagccactgaggtcctg

SEQ ID NO: 67481 - DNA, 40 bp, Homo sapiens
caggacctcagtggctcatataattaacagcacagggtga

SEQ ID NO: 67482 - DNA, 40 bp, Homo sapiens
caccctgtgctgttaattatatgagccactgaggtcctga

SEQ ID NO: 67483 - DNA, 40 bp, Homo sapiens
tcaggacctcagtggctcatataattaacagcacagggtg

SEQ ID NO: 67484 - DNA, 40 bp, Homo sapiens
accctgtgctgttaattatatgagccactgaggtcctgac

SEQ ID NO: 67485 - DNA, 40 bp, Homo sapiens
gtcaggacctcagtggctcatataattaacagcacagggt

SEQ ID NO: 67486 - DNA, 40 bp, Homo sapiens
ccctgtgctgttaattatatgagccactgaggtcctgaca

SEQ ID NO: 67487 - DNA, 40 bp, Homo sapiens
tgtcaggacctcagtggctcatataattaacagcacaggg

SEQ ID NO: 67488 - DNA, 40 bp, Homo sapiens
cctgtgctgttaattatatgagccactgaggtcctgacac

SEQ ID NO: 67489 - DNA, 40 bp, Homo sapiens
gtgtcaggacctcagtggctcatataattaacagcacagg

SEQ ID NO: 67490 - DNA, 40 bp, Homo sapiens
ctgtgctgttaattatatgagccactgaggtcctgacact

SEQ ID NO: 67491 - DNA, 40 bp, Homo sapiens
agtgtcaggacctcagtggctcatataattaacagcacag

SEQ ID NO: 67492 - DNA, 40 bp, Homo sapiens
tgtgctgttaattatatgagccactgaggtcctgacactg

SEQ ID NO: 67493 - DNA, 40 bp, Homo sapiens
cagtgtcaggacctcagtggctcatataattaacagcaca

SEQ ID NO: 67494 - DNA, 40 bp, Homo sapiens
gtgctgttaattatatgagccactgaggtcctgacactga

SEQ ID NO: 67495 - DNA, 40 bp, Homo sapiens
tcagtgtcaggacctcagtggctcatataattaacagcac

SEQ ID NO: 67496 - DNA, 40 bp, Homo sapiens
tgctgttaattatatgagccactgaggtcctgacactgaa

SEQ ID NO: 67497 - DNA, 40 bp, Homo sapiens
ttcagtgtcaggacctcagtggctcatataattaacagca

SEQ ID NO: 67498 - DNA, 40 bp, Homo sapiens
gctgttaattatatgagccactgaggtcctgacactgaat

SEQ ID NO: 67499 - DNA, 40 bp, Homo sapiens
attcagtgtcaggacctcagtggctcatataattaacagc

SEQ ID NO: 67500 - DNA, 40 bp, Homo sapiens
ctgttaattatatgagccactgaggtcctgacactgaatt

SEQ ID NO: 67501 - DNA, 40 bp, Homo sapiens
aattcagtgtcaggacctcagtggctcatataattaacag

SEQ ID NO: 67502 - DNA, 40 bp, Homo sapiens
tgttaattatatgagccactgaggtcctgacactgaattc

SEQ ID NO: 67503 - DNA, 40 bp, Homo sapiens
gaattcagtgtcaggacctcagtggctcatataattaaca

SEQ ID NO: 67504 - DNA, 40 bp, Homo sapiens
gttaattatatgagccactgaggtcctgacactgaattct

SEQ ID NO: 67505 - DNA, 40 bp, Homo sapiens
agaattcagtgtcaggacctcagtggctcatataattaac

SEQ ID NO: 67506 - DNA, 40 bp, Homo sapiens
ttaattatatgagccactgaggtcctgacactgaattctt

SEQ ID NO: 67507 - DNA, 40 bp, Homo sapiens
aagaattcagtgtcaggacctcagtggctcatataattaa

SEQ ID NO: 67508 - DNA, 40 bp, Homo sapiens
taattatatgagccactgaggtcctgacactgaattcttg

SEQ ID NO: 67509 - DNA, 40 bp, Homo sapiens
caagaattcagtgtcaggacctcagtggctcatataatta

SEQ ID NO: 67510 - DNA, 40 bp, Homo sapiens
aattatatgagccactgaggtcctgacactgaattcttgg

SEQ ID NO: 67511 - DNA, 40 bp, Homo sapiens
ccaagaattcagtgtcaggacctcagtggctcatataatt

SEQ ID NO: 67512 - DNA, 40 bp, Homo sapiens
attatatgagccactgaggtcctgacactgaattcttggt

SEQ ID NO: 67513 - DNA, 40 bp, Homo sapiens
accaagaattcagtgtcaggacctcagtggctcatataat

SEQ ID NO: 67514 - DNA, 40 bp, Homo sapiens
ttatatgagccactgaggtcctgacactgaattcttggtg

SEQ ID NO: 67515 - DNA, 40 bp, Homo sapiens
caccaagaattcagtgtcaggacctcagtggctcatataa

SEQ ID NO: 67516 - DNA, 40 bp, Homo sapiens
tatatgagccactgaggtcctgacactgaattcttggtgg

SEQ ID NO: 67517 - DNA, 40 bp, Homo sapiens
ccaccaagaattcagtgtcaggacctcagtggctcatata

SEQ ID NO: 67518 - DNA, 40 bp, Homo sapiens
atatgagccactgaggtcctgacactgaattcttggtggt

SEQ ID NO: 67519 - DNA, 40 bp, Homo sapiens
accaccaagaattcagtgtcaggacctcagtggctcatat

SEQ ID NO: 67520 - DNA, 40 bp, Homo sapiens
tatgagccactgaggtcctgacactgaattcttggtggtg

SEQ ID NO: 67521 - DNA, 40 bp, Homo sapiens
caccaccaagaattcagtgtcaggacctcagtggctcata

SEQ ID NO: 67522 - DNA, 40 bp, Homo sapiens
atgagccactgaggtcctgacactgaattcttggtggtgg

SEQ ID NO: 67523 - DNA, 40 bp, Homo sapiens
ccaccaccaagaattcagtgtcaggacctcagtggctcat

SEQ ID NO: 67524 - DNA, 40 bp, Homo sapiens
tgagccactgaggtcctgacactgaattcttggtggtgga

SEQ ID NO: 67525 - DNA, 40 bp, Homo sapiens
tccaccaccaagaattcagtgtcaggacctcagtggctca

SEQ ID NO: 67526 - DNA, 40 bp, Homo sapiens
gagccactgaggtcctgacactgaattcttggtggtggat

SEQ ID NO: 67527 - DNA, 40 bp, Homo sapiens
atccaccaccaagaattcagtgtcaggacctcagtggctc

SEQ ID NO: 67528 - DNA, 40 bp, Homo sapiens
agccactgaggtcctgacactgaattcttggtggtggata

SEQ ID NO: 67529 - DNA, 40 bp, Homo sapiens
tatccaccaccaagaattcagtgtcaggacctcagtggct

SEQ ID NO: 67530 - DNA, 40 bp, Homo sapiens
gccactgaggtcctgacactgaattcttggtggtggataa

SEQ ID NO: 67531 - DNA, 40 bp, Homo sapiens
ttatccaccaccaagaattcagtgtcaggacctcagtggc

SEQ ID NO: 67532 - DNA, 40 bp, Homo sapiens
ccactgaggtcctgacactgaattcttggtggtggataat

SEQ ID NO: 67533 - DNA, 40 bp, Homo sapiens
attatccaccaccaagaattcagtgtcaggacctcagtgg

SEQ ID NO: 67534 - DNA, 40 bp, Homo sapiens
cactgaggtcctgacactgaattcttggtggtggataata

SEQ ID NO: 67535 - DNA, 40 bp, Homo sapiens
tattatccaccaccaagaattcagtgtcaggacctcagtg

SEQ ID NO: 67536 - DNA, 40 bp, Homo sapiens
actgaggtcctgacactgaattcttggtggtggataataa

SEQ ID NO: 67537 - DNA, 40 bp, Homo sapiens
ttattatccaccaccaagaattcagtgtcaggacctcagt

SEQ ID NO: 67538 - DNA, 40 bp, Homo sapiens
ctgaggtcctgacactgaattcttggtggtggataataat

SEQ ID NO: 67539 - DNA, 40 bp, Homo sapiens
attattatccaccaccaagaattcagtgtcaggacctcag

SEQ ID NO: 67540 - DNA, 40 bp, Homo sapiens
tgaggtcctgacactgaattcttggtggtggataataatc

SEQ ID NO: 67541 - DNA, 40 bp, Homo sapiens
gattattatccaccaccaagaattcagtgtcaggacctca

SEQ ID NO: 67542 - DNA, 40 bp, Homo sapiens
gaggtcctgacactgaattcttggtggtggataataatct

SEQ ID NO: 67543 - DNA, 40 bp, Homo sapiens
agattattatccaccaccaagaattcagtgtcaggacctc

SEQ ID NO: 67544 - DNA, 40 bp, Homo sapiens
aggtcctgacactgaattcttggtggtggataataatctc

SEQ ID NO: 67545 - DNA, 40 bp, Homo sapiens
gagattattatccaccaccaagaattcagtgtcaggacct

SEQ ID NO: 67546 - DNA, 40 bp, Homo sapiens
ggtcctgacactgaattcttggtggtggataataatctct

SEQ ID NO: 67547 - DNA, 40 bp, Homo sapiens
agagattattatccaccaccaagaattcagtgtcaggacc

SEQ ID NO: 67548 - DNA, 40 bp, Homo sapiens
gtcctgacactgaattcttggtggtggataataatctctt

SEQ ID NO: 67549 - DNA, 40 bp, Homo sapiens
aagagattattatccaccaccaagaattcagtgtcaggac

SEQ ID NO: 67550 - DNA, 40 bp, Homo sapiens
tcctgacactgaattcttggtggtggataataatctcttc

SEQ ID NO: 67551 - DNA, 40 bp, Homo sapiens
gaagagattattatccaccaccaagaattcagtgtcagga

SEQ ID NO: 67552 - DNA, 40 bp, Homo sapiens
cctgacactgaattcttggtggtggataataatctcttct

SEQ ID NO: 67553 - DNA, 40 bp, Homo sapiens
agaagagattattatccaccaccaagaattcagtgtcagg

SEQ ID NO: 67554 - DNA, 40 bp, Homo sapiens
ctgacactgaattcttggtggtggataataatctcttctt

SEQ ID NO: 67555 - DNA, 40 bp, Homo sapiens
aagaagagattattatccaccaccaagaattcagtgtcag

SEQ ID NO: 67556 - DNA, 40 bp, Homo sapiens
tgacactgaattcttggtggtggataataatctcttcttt

SEQ ID NO: 67557 - DNA, 40 bp, Homo sapiens
aaagaagagattattatccaccaccaagaattcagtgtca

SEQ ID NO: 67558 - DNA, 40 bp, Homo sapiens
gacactgaattcttggtggtggataataatctcttctttt

SEQ ID NO: 67559 - DNA, 40 bp, Homo sapiens
aaaagaagagattattatccaccaccaagaattcagtgtc

SEQ ID NO: 67560 - DNA, 40 bp, Homo sapiens
acactgaattcttggtggtggataataatctcttcttttt

SEQ ID NO: 67561 - DNA, 40 bp, Homo sapiens
aaaaagaagagattattatccaccaccaagaattcagtgt

SEQ ID NO: 67562 - DNA, 40 bp, Homo sapiens
cactgaattcttggtggtggataataatctcttcttttta

SEQ ID NO: 67563 - DNA, 40 bp, Homo sapiens
taaaaagaagagattattatccaccaccaagaattcagtg

SEQ ID NO: 67564 - DNA, 40 bp, Homo sapiens
actgaattcttggtggtggataataatctcttctttttaa

SEQ ID NO: 67565 - DNA, 40 bp, Homo sapiens
ttaaaaagaagagattattatccaccaccaagaattcagt

SEQ ID NO: 67566 - DNA, 40 bp, Homo sapiens
ctgaattcttggtggtggataataatctcttctttttaat

SEQ ID NO: 67567 - DNA, 40 bp, Homo sapiens
attaaaaagaagagattattatccaccaccaagaattcag

SEQ ID NO: 67568 - DNA, 40 bp, Homo sapiens
tgaattcttggtggtggataataatctcttctttttaatt

SEQ ID NO: 67569 - DNA, 40 bp, Homo sapiens
aattaaaaagaagagattattatccaccaccaagaattca

SEQ ID NO: 67570 - DNA, 40 bp, Homo sapiens
gaattcttggtggtggataataatctcttctttttaatta

SEQ ID NO: 67571 - DNA, 40 bp, Homo sapiens
taattaaaaagaagagattattatccaccaccaagaattc

SEQ ID NO: 67572 - DNA, 40 bp, Homo sapiens
aattcttggtggtggataataatctcttctttttaattat

SEQ ID NO: 67573 - DNA, 40 bp, Homo sapiens
ataattaaaaagaagagattattatccaccaccaagaatt

SEQ ID NO: 67574 - DNA, 40 bp, Homo sapiens
attcttggtggtggataataatctcttctttttaattatt

SEQ ID NO: 67575 - DNA, 40 bp, Homo sapiens
aataattaaaaagaagagattattatccaccaccaagaat

SEQ ID NO: 67576 - DNA, 40 bp, Homo sapiens
ttcttggtggtggataataatctcttctttttaattattg

SEQ ID NO: 67577 - DNA, 40 bp, Homo sapiens
caataattaaaaagaagagattattatccaccaccaagaa

SEQ ID NO: 67578 - DNA, 40 bp, Homo sapiens
tcttggtggtggataataatctcttctttttaattattgg

SEQ ID NO: 67579 - DNA, 40 bp, Homo sapiens
ccaataattaaaaagaagagattattatccaccaccaaga

SEQ ID NO: 67580 - DNA, 40 bp, Homo sapiens
cttggtggtggataataatctcttctttttaattattggc

SEQ ID NO: 67581 - DNA, 40 bp, Homo sapiens
gccaataattaaaaagaagagattattatccaccaccaag

SEQ ID NO: 67582 - DNA, 40 bp, Homo sapiens
ttggtggtggataataatctcttctttttaattattggct

SEQ ID NO: 67583 - DNA, 40 bp, Homo sapiens
agccaataattaaaaagaagagattattatccaccaccaa

SEQ ID NO: 67584 - DNA, 40 bp, Homo sapiens
tggtggtggataataatctcttctttttaattattggctt

SEQ ID NO: 67585 - DNA, 40 bp, Homo sapiens
aagccaataattaaaaagaagagattattatccaccacca

SEQ ID NO: 67586 - DNA, 40 bp, Homo sapiens
ggtggtggataataatctcttctttttaattattggcttc

SEQ ID NO: 67587 - DNA, 40 bp, Homo sapiens
gaagccaataattaaaaagaagagattattatccaccacc

SEQ ID NO: 67588 - DNA, 40 bp, Homo sapiens
gtggtggataataatctcttctttttaattattggcttcc

SEQ ID NO: 67589 - DNA, 40 bp, Homo sapiens
ggaagccaataattaaaaagaagagattattatccaccac

SEQ ID NO: 67590 - DNA, 40 bp, Homo sapiens
tggtggataataatctcttctttttaattattggcttcca

SEQ ID NO: 67591 - DNA, 40 bp, Homo sapiens
tggaagccaataattaaaaagaagagattattatccacca

SEQ ID NO: 67592 - DNA, 40 bp, Homo sapiens
ggtggataataatctcttctttttaattattggcttccaa

SEQ ID NO: 67593 - DNA, 40 bp, Homo sapiens
ttggaagccaataattaaaaagaagagattattatccacc

SEQ ID NO: 67594 - DNA, 40 bp, Homo sapiens
gtggataataatctcttctttttaattattggcttccaat

SEQ ID NO: 67595 - DNA, 40 bp, Homo sapiens
attggaagccaataattaaaaagaagagattattatccac

SEQ ID NO: 67596 - DNA, 40 bp, Homo sapiens
tggataataatctcttctttttaattattggcttccaatt

SEQ ID NO: 67597 - DNA, 40 bp, Homo sapiens
aattggaagccaataattaaaaagaagagattattatcca

SEQ ID NO: 67598 - DNA, 40 bp, Homo sapiens
ggataataatctcttctttttaattattggcttccaattc

SEQ ID NO: 67599 - DNA, 40 bp, Homo sapiens
gaattggaagccaataattaaaaagaagagattattatcc

SEQ ID NO: 67600 - DNA, 40 bp, Homo sapiens
gataataatctcttctttttaattattggcttccaattct

SEQ ID NO: 67601 - DNA, 40 bp, Homo sapiens
agaattggaagccaataattaaaaagaagagattattatc

SEQ ID NO: 67602 - DNA, 40 bp, Homo sapiens
ataataatctcttctttttaattattggcttccaattctc

SEQ ID NO: 67603 - DNA, 40 bp, Homo sapiens
gagaattggaagccaataattaaaaagaagagattattat

SEQ ID NO: 67604 - DNA, 40 bp, Homo sapiens
taataatctcttctttttaattattggcttccaattctct

SEQ ID NO: 67605 - DNA, 40 bp, Homo sapiens
agagaattggaagccaataattaaaaagaagagattatta

SEQ ID NO: 67606 - DNA, 40 bp, Homo sapiens
aataatctcttctttttaattattggcttccaattctctc

SEQ ID NO: 67607 - DNA, 40 bp, Homo sapiens
gagagaattggaagccaataattaaaaagaagagattatt

SEQ ID NO: 67608 - DNA, 40 bp, Homo sapiens
ataatctcttctttttaattattggcttccaattctctct

SEQ ID NO: 67609 - DNA, 40 bp, Homo sapiens
agagagaattggaagccaataattaaaaagaagagattat

SEQ ID NO: 67610 - DNA, 40 bp, Homo sapiens
taatctcttctttttaattattggcttccaattctctctg

SEQ ID NO: 67611 - DNA, 40 bp, Homo sapiens
cagagagaattggaagccaataattaaaaagaagagatta

SEQ ID NO: 67612 - DNA, 40 bp, Homo sapiens
aatctcttctttttaattattggcttccaattctctctgc

SEQ ID NO: 67613 - DNA, 40 bp, Homo sapiens
gcagagagaattggaagccaataattaaaaagaagagatt

SEQ ID NO: 67614 - DNA, 40 bp, Homo sapiens
atctcttctttttaattattggcttccaattctctctgca

SEQ ID NO: 67615 - DNA, 40 bp, Homo sapiens
tgcagagagaattggaagccaataattaaaaagaagagat

SEQ ID NO: 67616 - DNA, 40 bp, Homo sapiens
tctcttctttttaattattggcttccaattctctctgcat

SEQ ID NO: 67617 - DNA, 40 bp, Homo sapiens
atgcagagagaattggaagccaataattaaaaagaagaga

SEQ ID NO: 67618 - DNA, 40 bp, Homo sapiens
ctcttctttttaattattggcttccaattctctctgcatt

SEQ ID NO: 67619 - DNA, 40 bp, Homo sapiens
aatgcagagagaattggaagccaataattaaaaagaagag

SEQ ID NO: 67620 - DNA, 40 bp, Homo sapiens
tcttctttttaattattggcttccaattctctctgcattg

SEQ ID NO: 67621 - DNA, 40 bp, Homo sapiens
caatgcagagagaattggaagccaataattaaaaagaaga

SEQ ID NO: 67622 - DNA, 40 bp, Homo sapiens
cttctttttaattattggcttccaattctctctgcattgc

SEQ ID NO: 67623 - DNA, 40 bp, Homo sapiens
gcaatgcagagagaattggaagccaataattaaaaagaag

SEQ ID NO: 67624 - DNA, 40 bp, Homo sapiens
ttctttttaattattggcttccaattctctctgcattgct

SEQ ID NO: 67625 - DNA, 40 bp, Homo sapiens
agcaatgcagagagaattggaagccaataattaaaaagaa

SEQ ID NO: 67626 - DNA, 40 bp, Homo sapiens
tctttttaattattggcttccaattctctctgcattgctg

SEQ ID NO: 67627 - DNA, 40 bp, Homo sapiens
cagcaatgcagagagaattggaagccaataattaaaaaga

SEQ ID NO: 67628 - DNA, 40 bp, Homo sapiens
ctttttaattattggcttccaattctctctgcattgctgg

SEQ ID NO: 67629 - DNA, 40 bp, Homo sapiens
ccagcaatgcagagagaattggaagccaataattaaaaag

SEQ ID NO: 67630 - DNA, 40 bp, Homo sapiens
tttttaattattggcttccaattctctctgcattgctgga

SEQ ID NO: 67631 - DNA, 40 bp, Homo sapiens
tccagcaatgcagagagaattggaagccaataattaaaaa

SEQ ID NO: 67632 - DNA, 40 bp, Homo sapiens
ttttaattattggcttccaattctctctgcattgctggaa

SEQ ID NO: 67633 - DNA, 40 bp, Homo sapiens
ttccagcaatgcagagagaattggaagccaataattaaaa

SEQ ID NO: 67634 - DNA, 40 bp, Homo sapiens
tttaattattggcttccaattctctctgcattgctggaaa

SEQ ID NO: 67635 - DNA, 40 bp, Homo sapiens
tttccagcaatgcagagagaattggaagccaataattaaa

SEQ ID NO: 67636 - DNA, 40 bp, Homo sapiens
ttaattattggcttccaattctctctgcattgctggaaac

SEQ ID NO: 67637 - DNA, 40 bp, Homo sapiens
gtttccagcaatgcagagagaattggaagccaataattaa

SEQ ID NO: 67638 - DNA, 40 bp, Homo sapiens
taattattggcttccaattctctctgcattgctggaaaca

SEQ ID NO: 67639 - DNA, 40 bp, Homo sapiens
tgtttccagcaatgcagagagaattggaagccaataatta

SEQ ID NO: 67640 - DNA, 40 bp, Homo sapiens
aattattggcttccaattctctctgcattgctggaaacaa

SEQ ID NO: 67641 - DNA, 40 bp, Homo sapiens
ttgtttccagcaatgcagagagaattggaagccaataatt

SEQ ID NO: 67642 - DNA, 40 bp, Homo sapiens
attattggcttccaattctctctgcattgctggaaacaaa

SEQ ID NO: 67643 - DNA, 40 bp, Homo sapiens
tttgtttccagcaatgcagagagaattggaagccaataat

SEQ ID NO: 67644 - DNA, 40 bp, Homo sapiens
ttattggcttccaattctctctgcattgctggaaacaaaa

SEQ ID NO: 67645 - DNA, 40 bp, Homo sapiens
ttttgtttccagcaatgcagagagaattggaagccaataa

SEQ ID NO: 67646 - DNA, 40 bp, Homo sapiens
tattggcttccaattctctctgcattgctggaaacaaaaa

SEQ ID NO: 67647 - DNA, 40 bp, Homo sapiens
tttttgtttccagcaatgcagagagaattggaagccaata

SEQ ID NO: 67648 - DNA, 40 bp, Homo sapiens
attggcttccaattctctctgcattgctggaaacaaaaat

SEQ ID NO: 67649 - DNA, 40 bp, Homo sapiens
atttttgtttccagcaatgcagagagaattggaagccaat

SEQ ID NO: 67650 - DNA, 40 bp, Homo sapiens
ttggcttccaattctctctgcattgctggaaacaaaaatc

SEQ ID NO: 67651 - DNA, 40 bp, Homo sapiens
gatttttgtttccagcaatgcagagagaattggaagccaa

SEQ ID NO: 67652 - DNA, 40 bp, Homo sapiens
tggcttccaattctctctgcattgctggaaacaaaaatca

SEQ ID NO: 67653 - DNA, 40 bp, Homo sapiens
tgatttttgtttccagcaatgcagagagaattggaagcca

SEQ ID NO: 67654 - DNA, 40 bp, Homo sapiens
ggcttccaattctctctgcattgctggaaacaaaaatcat

SEQ ID NO: 67655 - DNA, 40 bp, Homo sapiens
atgatttttgtttccagcaatgcagagagaattggaagcc

SEQ ID NO: 67656 - DNA, 40 bp, Homo sapiens
gcttccaattctctctgcattgctggaaacaaaaatcata

SEQ ID NO: 67657 - DNA, 40 bp, Homo sapiens
tatgatttttgtttccagcaatgcagagagaattggaagc

SEQ ID NO: 67658 - DNA, 40 bp, Homo sapiens
cttccaattctctctgcattgctggaaacaaaaatcatat

SEQ ID NO: 67659 - DNA, 40 bp, Homo sapiens
atatgatttttgtttccagcaatgcagagagaattggaag

SEQ ID NO: 67660 - DNA, 40 bp, Homo sapiens
ttccaattctctctgcattgctggaaacaaaaatcatata

SEQ ID NO: 67661 - DNA, 40 bp, Homo sapiens
tatatgatttttgtttccagcaatgcagagagaattggaa

SEQ ID NO: 67662 - DNA, 40 bp, Homo sapiens
tccaattctctctgcattgctggaaacaaaaatcatatat

SEQ ID NO: 67663 - DNA, 40 bp, Homo sapiens
atatatgatttttgtttccagcaatgcagagagaattgga

SEQ ID NO: 67664 - DNA, 40 bp, Homo sapiens
ccaattctctctgcattgctggaaacaaaaatcatatatt

SEQ ID NO: 67665 - DNA, 40 bp, Homo sapiens
aatatatgatttttgtttccagcaatgcagagagaattgg

SEQ ID NO: 67666 - DNA, 40 bp, Homo sapiens
caattctctctgcattgctggaaacaaaaatcatatattt

SEQ ID NO: 67667 - DNA, 40 bp, Homo sapiens
aaatatatgatttttgtttccagcaatgcagagagaattg

SEQ ID NO: 67668 - DNA, 40 bp, Homo sapiens
aattctctctgcattgctggaaacaaaaatcatatatttc

SEQ ID NO: 67669 - DNA, 40 bp, Homo sapiens
gaaatatatgatttttgtttccagcaatgcagagagaatt

SEQ ID NO: 67670 - DNA, 40 bp, Homo sapiens
attctctctgcattgctggaaacaaaaatcatatatttca

SEQ ID NO: 67671 - DNA, 40 bp, Homo sapiens
tgaaatatatgatttttgtttccagcaatgcagagagaat

SEQ ID NO: 67672 - DNA, 40 bp, Homo sapiens
ttctctctgcattgctggaaacaaaaatcatatatttcac

SEQ ID NO: 67673 - DNA, 40 bp, Homo sapiens
gtgaaatatatgatttttgtttccagcaatgcagagagaa

SEQ ID NO: 67674 - DNA, 40 bp, Homo sapiens
tctctctgcattgctggaaacaaaaatcatatatttcact

SEQ ID NO: 67675 - DNA, 40 bp, Homo sapiens
agtgaaatatatgatttttgtttccagcaatgcagagaga

SEQ ID NO: 67676 - DNA, 40 bp, Homo sapiens
ctctctgcattgctggaaacaaaaatcatatatttcacta

SEQ ID NO: 67677 - DNA, 40 bp, Homo sapiens
tagtgaaatatatgatttttgtttccagcaatgcagagag

SEQ ID NO: 67678 - DNA, 40 bp, Homo sapiens
tctctgcattgctggaaacaaaaatcatatatttcactat

SEQ ID NO: 67679 - DNA, 40 bp, Homo sapiens
atagtgaaatatatgatttttgtttccagcaatgcagaga

SEQ ID NO: 67680 - DNA, 40 bp, Homo sapiens
ctctgcattgctggaaacaaaaatcatatatttcactatt

SEQ ID NO: 67681 - DNA, 40 bp, Homo sapiens
aatagtgaaatatatgatttttgtttccagcaatgcagag

SEQ ID NO: 67682 - DNA, 40 bp, Homo sapiens
tctgcattgctggaaacaaaaatcatatatttcactattg

SEQ ID NO: 67683 - DNA, 40 bp, Homo sapiens
caatagtgaaatatatgatttttgtttccagcaatgcaga

SEQ ID NO: 67684 - DNA, 40 bp, Homo sapiens
ctgcattgctggaaacaaaaatcatatatttcactattgg

SEQ ID NO: 67685 - DNA, 40 bp, Homo sapiens
ccaatagtgaaatatatgatttttgtttccagcaatgcag

SEQ ID NO: 67686 - DNA, 40 bp, Homo sapiens
tgcattgctggaaacaaaaatcatatatttcactattggt

SEQ ID NO: 67687 - DNA, 40 bp, Homo sapiens
accaatagtgaaatatatgatttttgtttccagcaatgca

SEQ ID NO: 67688 - DNA, 40 bp, Homo sapiens
gcattgctggaaacaaaaatcatatatttcactattggtg

SEQ ID NO: 67689 - DNA, 40 bp, Homo sapiens
caccaatagtgaaatatatgatttttgtttccagcaatgc

SEQ ID NO: 67690 - DNA, 40 bp, Homo sapiens
cattgctggaaacaaaaatcatatatttcactattggtgg

SEQ ID NO: 67691 - DNA, 40 bp, Homo sapiens
ccaccaatagtgaaatatatgatttttgtttccagcaatg

SEQ ID NO: 67692 - DNA, 40 bp, Homo sapiens
attgctggaaacaaaaatcatatatttcactattggtggt

SEQ ID NO: 67693 - DNA, 40 bp, Homo sapiens
accaccaatagtgaaatatatgatttttgtttccagcaat

SEQ ID NO: 67694 - DNA, 40 bp, Homo sapiens
ttgctggaaacaaaaatcatatatttcactattggtggtg

SEQ ID NO: 67695 - DNA, 40 bp, Homo sapiens
caccaccaatagtgaaatatatgatttttgtttccagcaa

SEQ ID NO: 67696 - DNA, 40 bp, Homo sapiens
tgctggaaacaaaaatcatatatttcactattggtggtgg

SEQ ID NO: 67697 - DNA, 40 bp, Homo sapiens
ccaccaccaatagtgaaatatatgatttttgtttccagca

SEQ ID NO: 67698 - DNA, 40 bp, Homo sapiens
gctggaaacaaaaatcatatatttcactattggtggtggg

SEQ ID NO: 67699 - DNA, 40 bp, Homo sapiens
cccaccaccaatagtgaaatatatgatttttgtttccagc

SEQ ID NO: 67700 - DNA, 40 bp, Homo sapiens
ctggaaacaaaaatcatatatttcactattggtggtgggg

SEQ ID NO: 67701 - DNA, 40 bp, Homo sapiens
ccccaccaccaatagtgaaatatatgatttttgtttccag

SEQ ID NO: 67702 - DNA, 40 bp, Homo sapiens
tggaaacaaaaatcatatatttcactattggtggtgggga

SEQ ID NO: 67703 - DNA, 40 bp, Homo sapiens
tccccaccaccaatagtgaaatatatgatttttgtttcca

SEQ ID NO: 67704 - DNA, 40 bp, Homo sapiens
ggaaacaaaaatcatatatttcactattggtggtggggat

SEQ ID NO: 67705 - DNA, 40 bp, Homo sapiens
atccccaccaccaatagtgaaatatatgatttttgtttcc

SEQ ID NO: 67706 - DNA, 40 bp, Homo sapiens
gaaacaaaaatcatatatttcactattggtggtggggatg

SEQ ID NO: 67707 - DNA, 40 bp, Homo sapiens
catccccaccaccaatagtgaaatatatgatttttgtttc

SEQ ID NO: 67708 - DNA, 40 bp, Homo sapiens
aaacaaaaatcatatatttcactattggtggtggggatgc

SEQ ID NO: 67709 - DNA, 40 bp, Homo sapiens
gcatccccaccaccaatagtgaaatatatgatttttgttt

SEQ ID NO: 67710 - DNA, 40 bp, Homo sapiens
aacaaaaatcatatatttcactattggtggtggggatgct

SEQ ID NO: 67711 - DNA, 40 bp, Homo sapiens
agcatccccaccaccaatagtgaaatatatgatttttgtt

SEQ ID NO: 67712 - DNA, 40 bp, Homo sapiens
acaaaaatcatatatttcactattggtggtggggatgctg

SEQ ID NO: 67713 - DNA, 40 bp, Homo sapiens
cagcatccccaccaccaatagtgaaatatatgatttttgt

SEQ ID NO: 67714 - DNA, 40 bp, Homo sapiens
caaaaatcatatatttcactattggtggtggggatgctgt

SEQ ID NO: 67715 - DNA, 40 bp, Homo sapiens
acagcatccccaccaccaatagtgaaatatatgatttttg

SEQ ID NO: 67716 - DNA, 40 bp, Homo sapiens
aaaaatcatatatttcactattggtggtggggatgctgtc

SEQ ID NO: 67717 - DNA, 40 bp, Homo sapiens
gacagcatccccaccaccaatagtgaaatatatgattttt

SEQ ID NO: 67718 - DNA, 40 bp, Homo sapiens
aaaatcatatatttcactattggtggtggggatgctgtca

SEQ ID NO: 67719 - DNA, 40 bp, Homo sapiens
tgacagcatccccaccaccaatagtgaaatatatgatttt

SEQ ID NO: 67720 - DNA, 40 bp, Homo sapiens
aaatcatatatttcactattggtggtggggatgctgtcac

SEQ ID NO: 67721 - DNA, 40 bp, Homo sapiens
gtgacagcatccccaccaccaatagtgaaatatatgattt

SEQ ID NO: 67722 - DNA, 40 bp, Homo sapiens
aatcatatatttcactattggtggtggggatgctgtcact

SEQ ID NO: 67723 - DNA, 40 bp, Homo sapiens
agtgacagcatccccaccaccaatagtgaaatatatgatt

SEQ ID NO: 67724 - DNA, 40 bp, Homo sapiens
atcatatatttcactattggtggtggggatgctgtcactg

SEQ ID NO: 67725 - DNA, 40 bp, Homo sapiens
cagtgacagcatccccaccaccaatagtgaaatatatgat

SEQ ID NO: 67726 - DNA, 40 bp, Homo sapiens
tcatatatttcactattggtggtggggatgctgtcactga

SEQ ID NO: 67727 - DNA, 40 bp, Homo sapiens
tcagtgacagcatccccaccaccaatagtgaaatatatga

SEQ ID NO: 67728 - DNA, 40 bp, Homo sapiens
catatatttcactattggtggtggggatgctgtcactgaa

SEQ ID NO: 67729 - DNA, 40 bp, Homo sapiens
ttcagtgacagcatccccaccaccaatagtgaaatatatg

SEQ ID NO: 67730 - DNA, 40 bp, Homo sapiens
atatatttcactattggtggtggggatgctgtcactgaaa

SEQ ID NO: 67731 - DNA, 40 bp, Homo sapiens
tttcagtgacagcatccccaccaccaatagtgaaatatat

SEQ ID NO: 67732 - DNA, 40 bp, Homo sapiens
tatatttcactattggtggtggggatgctgtcactgaaaa

SEQ ID NO: 67733 - DNA, 40 bp, Homo sapiens
ttttcagtgacagcatccccaccaccaatagtgaaatata

SEQ ID NO: 67734 - DNA, 40 bp, Homo sapiens
atatttcactattggtggtggggatgctgtcactgaaaaa

SEQ ID NO: 67735 - DNA, 40 bp, Homo sapiens
tttttcagtgacagcatccccaccaccaatagtgaaatat

SEQ ID NO: 67736 - DNA, 40 bp, Homo sapiens
tatttcactattggtggtggggatgctgtcactgaaaaag

SEQ ID NO: 67737 - DNA, 40 bp, Homo sapiens
ctttttcagtgacagcatccccaccaccaatagtgaaata

SEQ ID NO: 67738 - DNA, 40 bp, Homo sapiens
atttcactattggtggtggggatgctgtcactgaaaaagt

SEQ ID NO: 67739 - DNA, 40 bp, Homo sapiens
actttttcagtgacagcatccccaccaccaatagtgaaat

SEQ ID NO: 67740 - DNA, 40 bp, Homo sapiens
tttcactattggtggtggggatgctgtcactgaaaaagta

SEQ ID NO: 67741 - DNA, 40 bp, Homo sapiens
tactttttcagtgacagcatccccaccaccaatagtgaaa

SEQ ID NO: 67742 - DNA, 40 bp, Homo sapiens
ttcactattggtggtggggatgctgtcactgaaaaagtag

SEQ ID NO: 67743 - DNA, 40 bp, Homo sapiens
ctactttttcagtgacagcatccccaccaccaatagtgaa

SEQ ID NO: 67744 - DNA, 40 bp, Homo sapiens
tcactattggtggtggggatgctgtcactgaaaaagtaga

SEQ ID NO: 67745 - DNA, 40 bp, Homo sapiens
tctactttttcagtgacagcatccccaccaccaatagtga

SEQ ID NO: 67746 - DNA, 40 bp, Homo sapiens
cactattggtggtggggatgctgtcactgaaaaagtagac

SEQ ID NO: 67747 - DNA, 40 bp, Homo sapiens
gtctactttttcagtgacagcatccccaccaccaatagtg

SEQ ID NO: 67748 - DNA, 40 bp, Homo sapiens
actattggtggtggggatgctgtcactgaaaaagtagaca

SEQ ID NO: 67749 - DNA, 40 bp, Homo sapiens
tgtctactttttcagtgacagcatccccaccaccaatagt

SEQ ID NO: 67750 - DNA, 40 bp, Homo sapiens
ctattggtggtggggatgctgtcactgaaaaagtagacac

SEQ ID NO: 67751 - DNA, 40 bp, Homo sapiens
gtgtctactttttcagtgacagcatccccaccaccaatag

SEQ ID NO: 67752 - DNA, 40 bp, Homo sapiens
tattggtggtggggatgctgtcactgaaaaagtagacaca

SEQ ID NO: 67753 - DNA, 40 bp, Homo sapiens
tgtgtctactttttcagtgacagcatccccaccaccaata

SEQ ID NO: 67754 - DNA, 40 bp, Homo sapiens
attggtggtggggatgctgtcactgaaaaagtagacacat

SEQ ID NO: 67755 - DNA, 40 bp, Homo sapiens
atgtgtctactttttcagtgacagcatccccaccaccaat

SEQ ID NO: 67756 - DNA, 40 bp, Homo sapiens
ttggtggtggggatgctgtcactgaaaaagtagacacatt

SEQ ID NO: 67757 - DNA, 40 bp, Homo sapiens
aatgtgtctactttttcagtgacagcatccccaccaccaa

SEQ ID NO: 67758 - DNA, 40 bp, Homo sapiens
tggtggtggggatgctgtcactgaaaaagtagacacattc

SEQ ID NO: 67759 - DNA, 40 bp, Homo sapiens
gaatgtgtctactttttcagtgacagcatccccaccacca

SEQ ID NO: 67760 - DNA, 40 bp, Homo sapiens
ggtggtggggatgctgtcactgaaaaagtagacacattca

SEQ ID NO: 67761 - DNA, 40 bp, Homo sapiens
tgaatgtgtctactttttcagtgacagcatccccaccacc

SEQ ID NO: 67762 - DNA, 40 bp, Homo sapiens
gtggtggggatgctgtcactgaaaaagtagacacattcat

SEQ ID NO: 67763 - DNA, 40 bp, Homo sapiens
atgaatgtgtctactttttcagtgacagcatccccaccac

SEQ ID NO: 67764 - DNA, 40 bp, Homo sapiens
tggtggggatgctgtcactgaaaaagtagacacattcata

SEQ ID NO: 67765 - DNA, 40 bp, Homo sapiens
tatgaatgtgtctactttttcagtgacagcatccccacca

SEQ ID NO: 67766 - DNA, 40 bp, Homo sapiens
ggtggggatgctgtcactgaaaaagtagacacattcatat

SEQ ID NO: 67767 - DNA, 40 bp, Homo sapiens
atatgaatgtgtctactttttcagtgacagcatccccacc

SEQ ID NO: 67768 - DNA, 40 bp, Homo sapiens
gtggggatgctgtcactgaaaaagtagacacattcatatt

SEQ ID NO: 67769 - DNA, 40 bp, Homo sapiens
aatatgaatgtgtctactttttcagtgacagcatccccac

SEQ ID NO: 67770 - DNA, 40 bp, Homo sapiens
tggggatgctgtcactgaaaaagtagacacattcatattg

SEQ ID NO: 67771 - DNA, 40 bp, Homo sapiens
caatatgaatgtgtctactttttcagtgacagcatcccca

SEQ ID NO: 67772 - DNA, 40 bp, Homo sapiens
ggggatgctgtcactgaaaaagtagacacattcatattga

SEQ ID NO: 67773 - DNA, 40 bp, Homo sapiens
tcaatatgaatgtgtctactttttcagtgacagcatcccc

SEQ ID NO: 67774 - DNA, 40 bp, Homo sapiens
gggatgctgtcactgaaaaagtagacacattcatattgat

SEQ ID NO: 67775 - DNA, 40 bp, Homo sapiens
atcaatatgaatgtgtctactttttcagtgacagcatccc

SEQ ID NO: 67776 - DNA, 40 bp, Homo sapiens
ggatgctgtcactgaaaaagtagacacattcatattgatt

SEQ ID NO: 67777 - DNA, 40 bp, Homo sapiens
aatcaatatgaatgtgtctactttttcagtgacagcatcc

SEQ ID NO: 67778 - DNA, 40 bp, Homo sapiens
gatgctgtcactgaaaaagtagacacattcatattgattt

SEQ ID NO: 67779 - DNA, 40 bp, Homo sapiens
aaatcaatatgaatgtgtctactttttcagtgacagcatc

SEQ ID NO: 67780 - DNA, 40 bp, Homo sapiens
atgctgtcactgaaaaagtagacacattcatattgatttt

SEQ ID NO: 67781 - DNA, 40 bp, Homo sapiens
aaaatcaatatgaatgtgtctactttttcagtgacagcat

SEQ ID NO: 67782 - DNA, 40 bp, Homo sapiens
tgctgtcactgaaaaagtagacacattcatattgatttta

SEQ ID NO: 67783 - DNA, 40 bp, Homo sapiens
taaaatcaatatgaatgtgtctactttttcagtgacagca

SEQ ID NO: 67784 - DNA, 40 bp, Homo sapiens
gctgtcactgaaaaagtagacacattcatattgattttag

SEQ ID NO: 67785 - DNA, 40 bp, Homo sapiens
ctaaaatcaatatgaatgtgtctactttttcagtgacagc

SEQ ID NO: 67786 - DNA, 40 bp, Homo sapiens
ctgtcactgaaaaagtagacacattcatattgattttaga

SEQ ID NO: 67787 - DNA, 40 bp, Homo sapiens
tctaaaatcaatatgaatgtgtctactttttcagtgacag

SEQ ID NO: 67788 - DNA, 40 bp, Homo sapiens
tgtcactgaaaaagtagacacattcatattgattttagaa

SEQ ID NO: 67789 - DNA, 40 bp, Homo sapiens
ttctaaaatcaatatgaatgtgtctactttttcagtgaca

SEQ ID NO: 67790 - DNA, 40 bp, Homo sapiens
gtcactgaaaaagtagacacattcatattgattttagaaa

SEQ ID NO: 67791 - DNA, 40 bp, Homo sapiens
tttctaaaatcaatatgaatgtgtctactttttcagtgac

SEQ ID NO: 67792 - DNA, 40 bp, Homo sapiens
tcactgaaaaagtagacacattcatattgattttagaaat

SEQ ID NO: 67793 - DNA, 40 bp, Homo sapiens
atttctaaaatcaatatgaatgtgtctactttttcagtga

SEQ ID NO: 67794 - DNA, 40 bp, Homo sapiens
cactgaaaaagtagacacattcatattgattttagaaata

SEQ ID NO: 67795 - DNA, 40 bp, Homo sapiens
tatttctaaaatcaatatgaatgtgtctactttttcagtg

SEQ ID NO: 67796 - DNA, 40 bp, Homo sapiens
actgaaaaagtagacacattcatattgattttagaaataa

SEQ ID NO: 67797 - DNA, 40 bp, Homo sapiens
ttatttctaaaatcaatatgaatgtgtctactttttcagt

SEQ ID NO: 67798 - DNA, 40 bp, Homo sapiens
ctgaaaaagtagacacattcatattgattttagaaataag

SEQ ID NO: 67799 - DNA, 40 bp, Homo sapiens
cttatttctaaaatcaatatgaatgtgtctactttttcag

SEQ ID NO: 67800 - DNA, 40 bp, Homo sapiens
tgaaaaagtagacacattcatattgattttagaaataagt

SEQ ID NO: 67801 - DNA, 40 bp, Homo sapiens
acttatttctaaaatcaatatgaatgtgtctactttttca

SEQ ID NO: 67802 - DNA, 40 bp, Homo sapiens
gaaaaagtagacacattcatattgattttagaaataagtt

SEQ ID NO: 67803 - DNA, 40 bp, Homo sapiens
aacttatttctaaaatcaatatgaatgtgtctactttttc

SEQ ID NO: 67804 - DNA, 40 bp, Homo sapiens
aaaaagtagacacattcatattgattttagaaataagtta

SEQ ID NO: 67805 - DNA, 40 bp, Homo sapiens
taacttatttctaaaatcaatatgaatgtgtctacttttt

SEQ ID NO: 67806 - DNA, 40 bp, Homo sapiens
aaaagtagacacattcatattgattttagaaataagttaa

SEQ ID NO: 67807 - DNA, 40 bp, Homo sapiens
ttaacttatttctaaaatcaatatgaatgtgtctactttt

SEQ ID NO: 67808 - DNA, 40 bp, Homo sapiens
aaagtagacacattcatattgattttagaaataagttaaa

SEQ ID NO: 67809 - DNA, 40 bp, Homo sapiens
tttaacttatttctaaaatcaatatgaatgtgtctacttt

SEQ ID NO: 67810 - DNA, 40 bp, Homo sapiens
aagtagacacattcatattgattttagaaataagttaaaa

SEQ ID NO: 67811 - DNA, 40 bp, Homo sapiens
ttttaacttatttctaaaatcaatatgaatgtgtctactt

SEQ ID NO: 67812 - DNA, 40 bp, Homo sapiens
agtagacacattcatattgattttagaaataagttaaaat

SEQ ID NO: 67813 - DNA, 40 bp, Homo sapiens
attttaacttatttctaaaatcaatatgaatgtgtctact

SEQ ID NO: 67814 - DNA, 40 bp, Homo sapiens
gtagacacattcatattgattttagaaataagttaaaatc

SEQ ID NO: 67815 - DNA, 40 bp, Homo sapiens
gattttaacttatttctaaaatcaatatgaatgtgtctac

SEQ ID NO: 67816 - DNA, 40 bp, Homo sapiens
tagacacattcatattgattttagaaataagttaaaatca

SEQ ID NO: 67817 - DNA, 40 bp, Homo sapiens
tgattttaacttatttctaaaatcaatatgaatgtgtcta

SEQ ID NO: 67818 - DNA, 40 bp, Homo sapiens
agacacattcatattgattttagaaataagttaaaatcaa

SEQ ID NO: 67819 - DNA, 40 bp, Homo sapiens
ttgattttaacttatttctaaaatcaatatgaatgtgtct

SEQ ID NO: 67820 - DNA, 40 bp, Homo sapiens
gacacattcatattgattttagaaataagttaaaatcaaa

SEQ ID NO: 67821 - DNA, 40 bp, Homo sapiens
tttgattttaacttatttctaaaatcaatatgaatgtgtc

SEQ ID NO: 67822 - DNA, 40 bp, Homo sapiens
acacattcatattgattttagaaataagttaaaatcaaaa

SEQ ID NO: 67823 - DNA, 40 bp, Homo sapiens
ttttgattttaacttatttctaaaatcaatatgaatgtgt

SEQ ID NO: 67824 - DNA, 40 bp, Homo sapiens
cacattcatattgattttagaaataagttaaaatcaaaat

SEQ ID NO: 67825 - DNA, 40 bp, Homo sapiens
attttgattttaacttatttctaaaatcaatatgaatgtg

SEQ ID NO: 67826 - DNA, 40 bp, Homo sapiens
acattcatattgattttagaaataagttaaaatcaaaatt

SEQ ID NO: 67827 - DNA, 40 bp, Homo sapiens
aattttgattttaacttatttctaaaatcaatatgaatgt

SEQ ID NO: 67828 - DNA, 40 bp, Homo sapiens
cattcatattgattttagaaataagttaaaatcaaaattt

SEQ ID NO: 67829 - DNA, 40 bp, Homo sapiens
aaattttgattttaacttatttctaaaatcaatatgaatg

SEQ ID NO: 67830 - DNA, 40 bp, Homo sapiens
attcatattgattttagaaataagttaaaatcaaaatttg

SEQ ID NO: 67831 - DNA, 40 bp, Homo sapiens
caaattttgattttaacttatttctaaaatcaatatgaat

SEQ ID NO: 67832 - DNA, 40 bp, Homo sapiens
ttcatattgattttagaaataagttaaaatcaaaatttgc

SEQ ID NO: 67833 - DNA, 40 bp, Homo sapiens
gcaaattttgattttaacttatttctaaaatcaatatgaa

SEQ ID NO: 67834 - DNA, 40 bp, Homo sapiens
tcatattgattttagaaataagttaaaatcaaaatttgct

SEQ ID NO: 67835 - DNA, 40 bp, Homo sapiens
agcaaattttgattttaacttatttctaaaatcaatatga

SEQ ID NO: 67836 - DNA, 40 bp, Homo sapiens
catattgattttagaaataagttaaaatcaaaatttgctt

SEQ ID NO: 67837 - DNA, 40 bp, Homo sapiens
aagcaaattttgattttaacttatttctaaaatcaatatg

SEQ ID NO: 67838 - DNA, 40 bp, Homo sapiens
atattgattttagaaataagttaaaatcaaaatttgcttc

SEQ ID NO: 67839 - DNA, 40 bp, Homo sapiens
gaagcaaattttgattttaacttatttctaaaatcaatat

SEQ ID NO: 67840 - DNA, 40 bp, Homo sapiens
tattgattttagaaataagttaaaatcaaaatttgcttct

SEQ ID NO: 67841 - DNA, 40 bp, Homo sapiens
agaagcaaattttgattttaacttatttctaaaatcaata

SEQ ID NO: 67842 - DNA, 40 bp, Homo sapiens
attgattttagaaataagttaaaatcaaaatttgcttctg

SEQ ID NO: 67843 - DNA, 40 bp, Homo sapiens
cagaagcaaattttgattttaacttatttctaaaatcaat

SEQ ID NO: 67844 - DNA, 40 bp, Homo sapiens
ttgattttagaaataagttaaaatcaaaatttgcttctgc

SEQ ID NO: 67845 - DNA, 40 bp, Homo sapiens
gcagaagcaaattttgattttaacttatttctaaaatcaa

SEQ ID NO: 67846 - DNA, 40 bp, Homo sapiens
tgattttagaaataagttaaaatcaaaatttgcttctgct

SEQ ID NO: 67847 - DNA, 40 bp, Homo sapiens
agcagaagcaaattttgattttaacttatttctaaaatca

SEQ ID NO: 67848 - DNA, 40 bp, Homo sapiens
gattttagaaataagttaaaatcaaaatttgcttctgcta

SEQ ID NO: 67849 - DNA, 40 bp, Homo sapiens
tagcagaagcaaattttgattttaacttatttctaaaatc

SEQ ID NO: 67850 - DNA, 40 bp, Homo sapiens
attttagaaataagttaaaatcaaaatttgcttctgctaa

SEQ ID NO: 67851 - DNA, 40 bp, Homo sapiens
ttagcagaagcaaattttgattttaacttatttctaaaat

SEQ ID NO: 67852 - DNA, 40 bp, Homo sapiens
ttttagaaataagttaaaatcaaaatttgcttctgctaaa

SEQ ID NO: 67853 - DNA, 40 bp, Homo sapiens
tttagcagaagcaaattttgattttaacttatttctaaaa

SEQ ID NO: 67854 - DNA, 40 bp, Homo sapiens
tttagaaataagttaaaatcaaaatttgcttctgctaaat

SEQ ID NO: 67855 - DNA, 40 bp, Homo sapiens
atttagcagaagcaaattttgattttaacttatttctaaa

SEQ ID NO: 67856 - DNA, 40 bp, Homo sapiens
ttagaaataagttaaaatcaaaatttgcttctgctaaatt

SEQ ID NO: 67857 - DNA, 40 bp, Homo sapiens
aatttagcagaagcaaattttgattttaacttatttctaa

SEQ ID NO: 67858 - DNA, 40 bp, Homo sapiens
tagaaataagttaaaatcaaaatttgcttctgctaaatta

SEQ ID NO: 67859 - DNA, 40 bp, Homo sapiens
taatttagcagaagcaaattttgattttaacttatttcta

SEQ ID NO: 67860 - DNA, 40 bp, Homo sapiens
agaaataagttaaaatcaaaatttgcttctgctaaattag

SEQ ID NO: 67861 - DNA, 40 bp, Homo sapiens
ctaatttagcagaagcaaattttgattttaacttatttct

SEQ ID NO: 67862 - DNA, 40 bp, Homo sapiens
gaaataagttaaaatcaaaatttgcttctgctaaattagt

SEQ ID NO: 67863 - DNA, 40 bp, Homo sapiens
actaatttagcagaagcaaattttgattttaacttatttc

SEQ ID NO: 67864 - DNA, 40 bp, Homo sapiens
aaataagttaaaatcaaaatttgcttctgctaaattagta

SEQ ID NO: 67865 - DNA, 40 bp, Homo sapiens
tactaatttagcagaagcaaattttgattttaacttattt

SEQ ID NO: 67866 - DNA, 40 bp, Homo sapiens
aataagttaaaatcaaaatttgcttctgctaaattagtag

SEQ ID NO: 67867 - DNA, 40 bp, Homo sapiens
ctactaatttagcagaagcaaattttgattttaacttatt

SEQ ID NO: 67868 - DNA, 40 bp, Homo sapiens
ataagttaaaatcaaaatttgcttctgctaaattagtaga

SEQ ID NO: 67869 - DNA, 40 bp, Homo sapiens
tctactaatttagcagaagcaaattttgattttaacttat

SEQ ID NO: 67870 - DNA, 40 bp, Homo sapiens
taagttaaaatcaaaatttgcttctgctaaattagtagag

SEQ ID NO: 67871 - DNA, 40 bp, Homo sapiens
ctctactaatttagcagaagcaaattttgattttaactta

SEQ ID NO: 67872 - DNA, 40 bp, Homo sapiens
aagttaaaatcaaaatttgcttctgctaaattagtagagg

SEQ ID NO: 67873 - DNA, 40 bp, Homo sapiens
cctctactaatttagcagaagcaaattttgattttaactt

SEQ ID NO: 67874 - DNA, 40 bp, Homo sapiens
agttaaaatcaaaatttgcttctgctaaattagtagagga

SEQ ID NO: 67875 - DNA, 40 bp, Homo sapiens
tcctctactaatttagcagaagcaaattttgattttaact

SEQ ID NO: 67876 - DNA, 40 bp, Homo sapiens
gttaaaatcaaaatttgcttctgctaaattagtagaggac

SEQ ID NO: 67877 - DNA, 40 bp, Homo sapiens
gtcctctactaatttagcagaagcaaattttgattttaac

SEQ ID NO: 67878 - DNA, 40 bp, Homo sapiens
ttaaaatcaaaatttgcttctgctaaattagtagaggacc

SEQ ID NO: 67879 - DNA, 40 bp, Homo sapiens
ggtcctctactaatttagcagaagcaaattttgattttaa

SEQ ID NO: 67880 - DNA, 40 bp, Homo sapiens
taaaatcaaaatttgcttctgctaaattagtagaggacca

SEQ ID NO: 67881 - DNA, 40 bp, Homo sapiens
tggtcctctactaatttagcagaagcaaattttgatttta

SEQ ID NO: 67882 - DNA, 40 bp, Homo sapiens
aaaatcaaaatttgcttctgctaaattagtagaggaccaa

SEQ ID NO: 67883 - DNA, 40 bp, Homo sapiens
ttggtcctctactaatttagcagaagcaaattttgatttt

SEQ ID NO: 67884 - DNA, 40 bp, Homo sapiens
aaatcaaaatttgcttctgctaaattagtagaggaccaat

SEQ ID NO: 67885 - DNA, 40 bp, Homo sapiens
attggtcctctactaatttagcagaagcaaattttgattt

SEQ ID NO: 67886 - DNA, 40 bp, Homo sapiens
aatcaaaatttgcttctgctaaattagtagaggaccaata

SEQ ID NO: 67887 - DNA, 40 bp, Homo sapiens
tattggtcctctactaatttagcagaagcaaattttgatt

SEQ ID NO: 67888 - DNA, 40 bp, Homo sapiens
atcaaaatttgcttctgctaaattagtagaggaccaatac

SEQ ID NO: 67889 - DNA, 40 bp, Homo sapiens
gtattggtcctctactaatttagcagaagcaaattttgat

SEQ ID NO: 67890 - DNA, 40 bp, Homo sapiens
tcaaaatttgcttctgctaaattagtagaggaccaatact

SEQ ID NO: 67891 - DNA, 40 bp, Homo sapiens
agtattggtcctctactaatttagcagaagcaaattttga

SEQ ID NO: 67892 - DNA, 40 bp, Homo sapiens
caaaatttgcttctgctaaattagtagaggaccaatactg

SEQ ID NO: 67893 - DNA, 40 bp, Homo sapiens
cagtattggtcctctactaatttagcagaagcaaattttg

SEQ ID NO: 67894 - DNA, 40 bp, Homo sapiens
aaaatttgcttctgctaaattagtagaggaccaatactgt

SEQ ID NO: 67895 - DNA, 40 bp, Homo sapiens
acagtattggtcctctactaatttagcagaagcaaatttt

SEQ ID NO: 67896 - DNA, 40 bp, Homo sapiens
aaatttgcttctgctaaattagtagaggaccaatactgtt

SEQ ID NO: 67897 - DNA, 40 bp, Homo sapiens
aacagtattggtcctctactaatttagcagaagcaaattt

SEQ ID NO: 67898 - DNA, 40 bp, Homo sapiens
aatttgcttctgctaaattagtagaggaccaatactgttt

SEQ ID NO: 67899 - DNA, 40 bp, Homo sapiens
aaacagtattggtcctctactaatttagcagaagcaaatt

SEQ ID NO: 67900 - DNA, 40 bp, Homo sapiens
atttgcttctgctaaattagtagaggaccaatactgtttt

SEQ ID NO: 67901 - DNA, 40 bp, Homo sapiens
aaaacagtattggtcctctactaatttagcagaagcaaat

SEQ ID NO: 67902 - DNA, 40 bp, Homo sapiens
tttgcttctgctaaattagtagaggaccaatactgttttt

SEQ ID NO: 67903 - DNA, 40 bp, Homo sapiens
aaaaacagtattggtcctctactaatttagcagaagcaaa

SEQ ID NO: 67904 - DNA, 40 bp, Homo sapiens
ttgcttctgctaaattagtagaggaccaatactgtttttc

SEQ ID NO: 67905 - DNA, 40 bp, Homo sapiens
gaaaaacagtattggtcctctactaatttagcagaagcaa

SEQ ID NO: 67906 - DNA, 40 bp, Homo sapiens
tgcttctgctaaattagtagaggaccaatactgtttttct

SEQ ID NO: 67907 - DNA, 40 bp, Homo sapiens
agaaaaacagtattggtcctctactaatttagcagaagca

SEQ ID NO: 67908 - DNA, 40 bp, Homo sapiens
gcttctgctaaattagtagaggaccaatactgtttttctc

SEQ ID NO: 67909 - DNA, 40 bp, Homo sapiens
gagaaaaacagtattggtcctctactaatttagcagaagc

SEQ ID NO: 67910 - DNA, 40 bp, Homo sapiens
cttctgctaaattagtagaggaccaatactgtttttctcc

SEQ ID NO: 67911 - DNA, 40 bp, Homo sapiens
ggagaaaaacagtattggtcctctactaatttagcagaag

SEQ ID NO: 67912 - DNA, 40 bp, Homo sapiens
ttctgctaaattagtagaggaccaatactgtttttctcct

SEQ ID NO: 67913 - DNA, 40 bp, Homo sapiens
aggagaaaaacagtattggtcctctactaatttagcagaa

SEQ ID NO: 67914 - DNA, 40 bp, Homo sapiens
tctgctaaattagtagaggaccaatactgtttttctcctt

SEQ ID NO: 67915 - DNA, 40 bp, Homo sapiens
aaggagaaaaacagtattggtcctctactaatttagcaga

SEQ ID NO: 67916 - DNA, 40 bp, Homo sapiens
ctgctaaattagtagaggaccaatactgtttttctccttc

SEQ ID NO: 67917 - DNA, 40 bp, Homo sapiens
gaaggagaaaaacagtattggtcctctactaatttagcag

SEQ ID NO: 67918 - DNA, 40 bp, Homo sapiens
tgctaaattagtagaggaccaatactgtttttctccttca

SEQ ID NO: 67919 - DNA, 40 bp, Homo sapiens
tgaaggagaaaaacagtattggtcctctactaatttagca

SEQ ID NO: 67920 - DNA, 40 bp, Homo sapiens
gctaaattagtagaggaccaatactgtttttctccttcat

SEQ ID NO: 67921 - DNA, 40 bp, Homo sapiens
atgaaggagaaaaacagtattggtcctctactaatttagc

SEQ ID NO: 67922 - DNA, 40 bp, Homo sapiens
ctaaattagtagaggaccaatactgtttttctccttcata

SEQ ID NO: 67923 - DNA, 40 bp, Homo sapiens
tatgaaggagaaaaacagtattggtcctctactaatttag

SEQ ID NO: 67924 - DNA, 40 bp, Homo sapiens
taaattagtagaggaccaatactgtttttctccttcatag

SEQ ID NO: 67925 - DNA, 40 bp, Homo sapiens
ctatgaaggagaaaaacagtattggtcctctactaattta

SEQ ID NO: 67926 - DNA, 40 bp, Homo sapiens
aaattagtagaggaccaatactgtttttctccttcatagt

SEQ ID NO: 67927 - DNA, 40 bp, Homo sapiens
actatgaaggagaaaaacagtattggtcctctactaattt

SEQ ID NO: 67928 - DNA, 40 bp, Homo sapiens
aattagtagaggaccaatactgtttttctccttcatagta

SEQ ID NO: 67929 - DNA, 40 bp, Homo sapiens
tactatgaaggagaaaaacagtattggtcctctactaatt

SEQ ID NO: 67930 - DNA, 40 bp, Homo sapiens
attagtagaggaccaatactgtttttctccttcatagtat

SEQ ID NO: 67931 - DNA, 40 bp, Homo sapiens
atactatgaaggagaaaaacagtattggtcctctactaat

SEQ ID NO: 67932 - DNA, 40 bp, Homo sapiens
ttagtagaggaccaatactgtttttctccttcatagtatg

SEQ ID NO: 67933 - DNA, 40 bp, Homo sapiens
catactatgaaggagaaaaacagtattggtcctctactaa

SEQ ID NO: 67934 - DNA, 40 bp, Homo sapiens
tagtagaggaccaatactgtttttctccttcatagtatgt

SEQ ID NO: 67935 - DNA, 40 bp, Homo sapiens
acatactatgaaggagaaaaacagtattggtcctctacta

SEQ ID NO: 67936 - DNA, 40 bp, Homo sapiens
agtagaggaccaatactgtttttctccttcatagtatgtt

SEQ ID NO: 67937 - DNA, 40 bp, Homo sapiens
aacatactatgaaggagaaaaacagtattggtcctctact

SEQ ID NO: 67938 - DNA, 40 bp, Homo sapiens
gtagaggaccaatactgtttttctccttcatagtatgttt

SEQ ID NO: 67939 - DNA, 40 bp, Homo sapiens
aaacatactatgaaggagaaaaacagtattggtcctctac

SEQ ID NO: 67940 - DNA, 40 bp, Homo sapiens
tagaggaccaatactgtttttctccttcatagtatgtttt

SEQ ID NO: 67941 - DNA, 40 bp, Homo sapiens
aaaacatactatgaaggagaaaaacagtattggtcctcta

SEQ ID NO: 67942 - DNA, 40 bp, Homo sapiens
agaggaccaatactgtttttctccttcatagtatgttttg

SEQ ID NO: 67943 - DNA, 40 bp, Homo sapiens
caaaacatactatgaaggagaaaaacagtattggtcctct

SEQ ID NO: 67944 - DNA, 40 bp, Homo sapiens
gaggaccaatactgtttttctccttcatagtatgttttgg

SEQ ID NO: 67945 - DNA, 40 bp, Homo sapiens
ccaaaacatactatgaaggagaaaaacagtattggtcctc

SEQ ID NO: 67946 - DNA, 40 bp, Homo sapiens
aggaccaatactgtttttctccttcatagtatgttttggt

SEQ ID NO: 67947 - DNA, 40 bp, Homo sapiens
accaaaacatactatgaaggagaaaaacagtattggtcct

SEQ ID NO: 67948 - DNA, 40 bp, Homo sapiens
ggaccaatactgtttttctccttcatagtatgttttggta

SEQ ID NO: 67949 - DNA, 40 bp, Homo sapiens
taccaaaacatactatgaaggagaaaaacagtattggtcc

SEQ ID NO: 67950 - DNA, 40 bp, Homo sapiens
gaccaatactgtttttctccttcatagtatgttttggtac

SEQ ID NO: 67951 - DNA, 40 bp, Homo sapiens
gtaccaaaacatactatgaaggagaaaaacagtattggtc

SEQ ID NO: 67952 - DNA, 40 bp, Homo sapiens
accaatactgtttttctccttcatagtatgttttggtact

SEQ ID NO: 67953 - DNA, 40 bp, Homo sapiens
agtaccaaaacatactatgaaggagaaaaacagtattggt

SEQ ID NO: 67954 - DNA, 40 bp, Homo sapiens
ccaatactgtttttctccttcatagtatgttttggtactt

SEQ ID NO: 67955 - DNA, 40 bp, Homo sapiens
aagtaccaaaacatactatgaaggagaaaaacagtattgg

SEQ ID NO: 67956 - DNA, 40 bp, Homo sapiens
caatactgtttttctccttcatagtatgttttggtacttc

SEQ ID NO: 67957 - DNA, 40 bp, Homo sapiens
gaagtaccaaaacatactatgaaggagaaaaacagtattg

SEQ ID NO: 67958 - DNA, 40 bp, Homo sapiens
aatactgtttttctccttcatagtatgttttggtacttct

SEQ ID NO: 67959 - DNA, 40 bp, Homo sapiens
agaagtaccaaaacatactatgaaggagaaaaacagtatt

SEQ ID NO: 67960 - DNA, 40 bp, Homo sapiens
atactgtttttctccttcatagtatgttttggtacttcta

SEQ ID NO: 67961 - DNA, 40 bp, Homo sapiens
tagaagtaccaaaacatactatgaaggagaaaaacagtat

SEQ ID NO: 67962 - DNA, 40 bp, Homo sapiens
tactgtttttctccttcatagtatgttttggtacttctac

SEQ ID NO: 67963 - DNA, 40 bp, Homo sapiens
gtagaagtaccaaaacatactatgaaggagaaaaacagta

SEQ ID NO: 67964 - DNA, 40 bp, Homo sapiens
actgtttttctccttcatagtatgttttggtacttctaca

SEQ ID NO: 67965 - DNA, 40 bp, Homo sapiens
tgtagaagtaccaaaacatactatgaaggagaaaaacagt

SEQ ID NO: 67966 - DNA, 40 bp, Homo sapiens
ctgtttttctccttcatagtatgttttggtacttctacat

SEQ ID NO: 67967 - DNA, 40 bp, Homo sapiens
atgtagaagtaccaaaacatactatgaaggagaaaaacag

SEQ ID NO: 67968 - DNA, 40 bp, Homo sapiens
tgtttttctccttcatagtatgttttggtacttctacatt

SEQ ID NO: 67969 - DNA, 40 bp, Homo sapiens
aatgtagaagtaccaaaacatactatgaaggagaaaaaca

SEQ ID NO: 67970 - DNA, 40 bp, Homo sapiens
gtttttctccttcatagtatgttttggtacttctacattg

SEQ ID NO: 67971 - DNA, 40 bp, Homo sapiens
caatgtagaagtaccaaaacatactatgaaggagaaaaac

SEQ ID NO: 67972 - DNA, 40 bp, Homo sapiens
tttttctccttcatagtatgttttggtacttctacattga

SEQ ID NO: 67973 - DNA, 40 bp, Homo sapiens
tcaatgtagaagtaccaaaacatactatgaaggagaaaaa

SEQ ID NO: 67974 - DNA, 40 bp, Homo sapiens
ttttctccttcatagtatgttttggtacttctacattgac

SEQ ID NO: 67975 - DNA, 40 bp, Homo sapiens
gtcaatgtagaagtaccaaaacatactatgaaggagaaaa

SEQ ID NO: 67976 - DNA, 40 bp, Homo sapiens
tttctccttcatagtatgttttggtacttctacattgaca

SEQ ID NO: 67977 - DNA, 40 bp, Homo sapiens
tgtcaatgtagaagtaccaaaacatactatgaaggagaaa

SEQ ID NO: 67978 - DNA, 40 bp, Homo sapiens
ttctccttcatagtatgttttggtacttctacattgacat

SEQ ID NO: 67979 - DNA, 40 bp, Homo sapiens
atgtcaatgtagaagtaccaaaacatactatgaaggagaa

SEQ ID NO: 67980 - DNA, 40 bp, Homo sapiens
tctccttcatagtatgttttggtacttctacattgacatt

SEQ ID NO: 67981 - DNA, 40 bp, Homo sapiens
aatgtcaatgtagaagtaccaaaacatactatgaaggaga

SEQ ID NO: 67982 - DNA, 40 bp, Homo sapiens
ctccttcatagtatgttttggtacttctacattgacatta

SEQ ID NO: 67983 - DNA, 40 bp, Homo sapiens
taatgtcaatgtagaagtaccaaaacatactatgaaggag

SEQ ID NO: 67984 - DNA, 40 bp, Homo sapiens
tccttcatagtatgttttggtacttctacattgacattat

SEQ ID NO: 67985 - DNA, 40 bp, Homo sapiens
ataatgtcaatgtagaagtaccaaaacatactatgaagga

SEQ ID NO: 67986 - DNA, 40 bp, Homo sapiens
ccttcatagtatgttttggtacttctacattgacattata

SEQ ID NO: 67987 - DNA, 40 bp, Homo sapiens
tataatgtcaatgtagaagtaccaaaacatactatgaagg

SEQ ID NO: 67988 - DNA, 40 bp, Homo sapiens
cttcatagtatgttttggtacttctacattgacattataa

SEQ ID NO: 67989 - DNA, 40 bp, Homo sapiens
ttataatgtcaatgtagaagtaccaaaacatactatgaag

SEQ ID NO: 67990 - DNA, 40 bp, Homo sapiens
ttcatagtatgttttggtacttctacattgacattataac

SEQ ID NO: 67991 - DNA, 40 bp, Homo sapiens
gttataatgtcaatgtagaagtaccaaaacatactatgaa

SEQ ID NO: 67992 - DNA, 40 bp, Homo sapiens
tcatagtatgttttggtacttctacattgacattataact

SEQ ID NO: 67993 - DNA, 40 bp, Homo sapiens
agttataatgtcaatgtagaagtaccaaaacatactatga

SEQ ID NO: 67994 - DNA, 40 bp, Homo sapiens
catagtatgttttggtacttctacattgacattataactt

SEQ ID NO: 67995 - DNA, 40 bp, Homo sapiens
aagttataatgtcaatgtagaagtaccaaaacatactatg

SEQ ID NO: 67996 - DNA, 40 bp, Homo sapiens
atagtatgttttggtacttctacattgacattataacttt

SEQ ID NO: 67997 - DNA, 40 bp, Homo sapiens
aaagttataatgtcaatgtagaagtaccaaaacatactat

SEQ ID NO: 67998 - DNA, 40 bp, Homo sapiens
tagtatgttttggtacttctacattgacattataactttt

SEQ ID NO: 67999 - DNA, 40 bp, Homo sapiens
aaaagttataatgtcaatgtagaagtaccaaaacatacta

SEQ ID NO: 68000 - DNA, 40 bp, Homo sapiens
agtatgttttggtacttctacattgacattataacttttt

SEQ ID NO: 68001 - DNA, 40 bp, Homo sapiens
aaaaagttataatgtcaatgtagaagtaccaaaacatact

SEQ ID NO: 68002 - DNA, 40 bp, Homo sapiens
gtatgttttggtacttctacattgacattataactttttt

SEQ ID NO: 68003 - DNA, 40 bp, Homo sapiens
aaaaaagttataatgtcaatgtagaagtaccaaaacatac

SEQ ID NO: 68004 - DNA, 40 bp, Homo sapiens
tatgttttggtacttctacattgacattataacttttttt

SEQ ID NO: 68005 - DNA, 40 bp, Homo sapiens
aaaaaaagttataatgtcaatgtagaagtaccaaaacata

SEQ ID NO: 68006 - DNA, 40 bp, Homo sapiens
atgttttggtacttctacattgacattataactttttttt

SEQ ID NO: 68007 - DNA, 40 bp, Homo sapiens
aaaaaaaagttataatgtcaatgtagaagtaccaaaacat

SEQ ID NO: 68008 - DNA, 40 bp, Homo sapiens
tgttttggtacttctacattgacattataacttttttttt

SEQ ID NO: 68009 - DNA, 40 bp, Homo sapiens
aaaaaaaaagttataatgtcaatgtagaagtaccaaaaca

SEQ ID NO: 68010 - DNA, 40 bp, Homo sapiens
gttttggtacttctacattgacattataactttttttttt

SEQ ID NO: 68011 - DNA, 40 bp, Homo sapiens
aaaaaaaaaagttataatgtcaatgtagaagtaccaaaac

SEQ ID NO: 68012 - DNA, 40 bp, Homo sapiens
ttttggtacttctacattgacattataacttttttttttt

SEQ ID NO: 68013 - DNA, 40 bp, Homo sapiens
aaaaaaaaaaagttataatgtcaatgtagaagtaccaaaa

SEQ ID NO: 68014 - DNA, 40 bp, Homo sapiens
tttggtacttctacattgacattataactttttttttttt

SEQ ID NO: 68015 - DNA, 40 bp, Homo sapiens
aaaaaaaaaaaagttataatgtcaatgtagaagtaccaaa

SEQ ID NO: 68016 - DNA, 40 bp, Homo sapiens
ttggtacttctacattgacattataactttttttttttta

SEQ ID NO: 68017 - DNA, 40 bp, Homo sapiens
taaaaaaaaaaaagttataatgtcaatgtagaagtaccaa

SEQ ID NO: 68018 - DNA, 40 bp, Homo sapiens
tggtacttctacattgacattataacttttttttttttaa

SEQ ID NO: 68019 - DNA, 40 bp, Homo sapiens
ttaaaaaaaaaaaagttataatgtcaatgtagaagtacca

SEQ ID NO: 68020 - DNA, 40 bp, Homo sapiens
ggtacttctacattgacattataacttttttttttttaaa

SEQ ID NO: 68021 - DNA, 40 bp, Homo sapiens
tttaaaaaaaaaaaagttataatgtcaatgtagaagtacc

SEQ ID NO: 68022 - DNA, 40 bp, Homo sapiens
gtacttctacattgacattataacttttttttttttaaac

SEQ ID NO: 68023 - DNA, 40 bp, Homo sapiens
gtttaaaaaaaaaaaagttataatgtcaatgtagaagtac

SEQ ID NO: 68024 - DNA, 40 bp, Homo sapiens
tacttctacattgacattataacttttttttttttaaaca

SEQ ID NO: 68025 - DNA, 40 bp, Homo sapiens
tgtttaaaaaaaaaaaagttataatgtcaatgtagaagta

SEQ ID NO: 68026 - DNA, 40 bp, Homo sapiens
acttctacattgacattataacttttttttttttaaacag

SEQ ID NO: 68027 - DNA, 40 bp, Homo sapiens
ctgtttaaaaaaaaaaaagttataatgtcaatgtagaagt

SEQ ID NO: 68028 - DNA, 40 bp, Homo sapiens
cttctacattgacattataacttttttttttttaaacaga

SEQ ID NO: 68029 - DNA, 40 bp, Homo sapiens
tctgtttaaaaaaaaaaaagttataatgtcaatgtagaag

SEQ ID NO: 68030 - DNA, 40 bp, Homo sapiens
ttctacattgacattataacttttttttttttaaacagaa

SEQ ID NO: 68031 - DNA, 40 bp, Homo sapiens
ttctgtttaaaaaaaaaaaagttataatgtcaatgtagaa

SEQ ID NO: 68032 - DNA, 40 bp, Homo sapiens
tctacattgacattataacttttttttttttaaacagaaa

SEQ ID NO: 68033 - DNA, 40 bp, Homo sapiens
tttctgtttaaaaaaaaaaaagttataatgtcaatgtaga

SEQ ID NO: 68034 - DNA, 40 bp, Homo sapiens
ctacattgacattataacttttttttttttaaacagaaat

SEQ ID NO: 68035 - DNA, 40 bp, Homo sapiens
atttctgtttaaaaaaaaaaaagttataatgtcaatgtag

SEQ ID NO: 68036 - DNA, 40 bp, Homo sapiens
tacattgacattataacttttttttttttaaacagaaata

SEQ ID NO: 68037 - DNA, 40 bp, Homo sapiens
tatttctgtttaaaaaaaaaaaagttataatgtcaatgta

SEQ ID NO: 68038 - DNA, 40 bp, Homo sapiens
acattgacattataacttttttttttttaaacagaaatag

SEQ ID NO: 68039 - DNA, 40 bp, Homo sapiens
ctatttctgtttaaaaaaaaaaaagttataatgtcaatgt

SEQ ID NO: 68040 - DNA, 40 bp, Homo sapiens
cattgacattataacttttttttttttaaacagaaataga

SEQ ID NO: 68041 - DNA, 40 bp, Homo sapiens
tctatttctgtttaaaaaaaaaaaagttataatgtcaatg

SEQ ID NO: 68042 - DNA, 40 bp, Homo sapiens
attgacattataacttttttttttttaaacagaaatagaa

SEQ ID NO: 68043 - DNA, 40 bp, Homo sapiens
ttctatttctgtttaaaaaaaaaaaagttataatgtcaat

SEQ ID NO: 68044 - DNA, 40 bp, Homo sapiens
ttgacattataacttttttttttttaaacagaaatagaag

SEQ ID NO: 68045 - DNA, 40 bp, Homo sapiens
cttctatttctgtttaaaaaaaaaaaagttataatgtcaa

SEQ ID NO: 68046 - DNA, 40 bp, Homo sapiens
tgacattataacttttttttttttaaacagaaatagaagt

SEQ ID NO: 68047 - DNA, 40 bp, Homo sapiens
acttctatttctgtttaaaaaaaaaaaagttataatgtca

SEQ ID NO: 68048 - DNA, 40 bp, Homo sapiens
gacattataacttttttttttttaaacagaaatagaagtt

SEQ ID NO: 68049 - DNA, 40 bp, Homo sapiens
aacttctatttctgtttaaaaaaaaaaaagttataatgtc

SEQ ID NO: 68050 - DNA, 40 bp, Homo sapiens
acattataacttttttttttttaaacagaaatagaagttt

SEQ ID NO: 68051 - DNA, 40 bp, Homo sapiens
aaacttctatttctgtttaaaaaaaaaaaagttataatgt

SEQ ID NO: 68052 - DNA, 40 bp, Homo sapiens
cattataacttttttttttttaaacagaaatagaagttta

SEQ ID NO: 68053 - DNA, 40 bp, Homo sapiens
taaacttctatttctgtttaaaaaaaaaaaagttataatg

SEQ ID NO: 68054 - DNA, 40 bp, Homo sapiens
attataacttttttttttttaaacagaaatagaagtttac

SEQ ID NO: 68055 - DNA, 40 bp, Homo sapiens
gtaaacttctatttctgtttaaaaaaaaaaaagttataat

SEQ ID NO: 68056 - DNA, 40 bp, Homo sapiens
ttataacttttttttttttaaacagaaatagaagtttaca

SEQ ID NO: 68057 - DNA, 40 bp, Homo sapiens
tgtaaacttctatttctgtttaaaaaaaaaaaagttataa

SEQ ID NO: 68058 - DNA, 40 bp, Homo sapiens
tataacttttttttttttaaacagaaatagaagtttacat

SEQ ID NO: 68059 - DNA, 40 bp, Homo sapiens
atgtaaacttctatttctgtttaaaaaaaaaaaagttata

SEQ ID NO: 68060 - DNA, 40 bp, Homo sapiens
ataacttttttttttttaaacagaaatagaagtttacatt

SEQ ID NO: 68061 - DNA, 40 bp, Homo sapiens
aatgtaaacttctatttctgtttaaaaaaaaaaaagttat

SEQ ID NO: 68062 - DNA, 40 bp, Homo sapiens
taacttttttttttttaaacagaaatagaagtttacattc

SEQ ID NO: 68063 - DNA, 40 bp, Homo sapiens
gaatgtaaacttctatttctgtttaaaaaaaaaaaagtta

SEQ ID NO: 68064 - DNA, 40 bp, Homo sapiens
aacttttttttttttaaacagaaatagaagtttacattct

SEQ ID NO: 68065 - DNA, 40 bp, Homo sapiens
agaatgtaaacttctatttctgtttaaaaaaaaaaaagtt

SEQ ID NO: 68066 - DNA, 40 bp, Homo sapiens
acttttttttttttaaacagaaatagaagtttacattctt

SEQ ID NO: 68067 - DNA, 40 bp, Homo sapiens
aagaatgtaaacttctatttctgtttaaaaaaaaaaaagt

SEQ ID NO: 68068 - DNA, 40 bp, Homo sapiens
cttttttttttttaaacagaaatagaagtttacattctta

SEQ ID NO: 68069 - DNA, 40 bp, Homo sapiens
taagaatgtaaacttctatttctgtttaaaaaaaaaaaag

SEQ ID NO: 68070 - DNA, 40 bp, Homo sapiens
ttttttttttttaaacagaaatagaagtttacattcttag

SEQ ID NO: 68071 - DNA, 40 bp, Homo sapiens
ctaagaatgtaaacttctatttctgtttaaaaaaaaaaaa

SEQ ID NO: 68072 - DNA, 40 bp, Homo sapiens
tttttttttttaaacagaaatagaagtttacattcttaga

SEQ ID NO: 68073 - DNA, 40 bp, Homo sapiens
tctaagaatgtaaacttctatttctgtttaaaaaaaaaaa

SEQ ID NO: 68074 - DNA, 40 bp, Homo sapiens
ttttttttttaaacagaaatagaagtttacattcttagaa

SEQ ID NO: 68075 - DNA, 40 bp, Homo sapiens
ttctaagaatgtaaacttctatttctgtttaaaaaaaaaa

SEQ ID NO: 68076 - DNA, 40 bp, Homo sapiens
tttttttttaaacagaaatagaagtttacattcttagaaa

SEQ ID NO: 68077 - DNA, 40 bp, Homo sapiens
tttctaagaatgtaaacttctatttctgtttaaaaaaaaa

SEQ ID NO: 68078 - DNA, 40 bp, Homo sapiens
ttttttttaaacagaaatagaagtttacattcttagaaaa

SEQ ID NO: 68079 - DNA, 40 bp, Homo sapiens
ttttctaagaatgtaaacttctatttctgtttaaaaaaaa

SEQ ID NO: 68080 - DNA, 40 bp, Homo sapiens
tttttttaaacagaaatagaagtttacattcttagaaaat

SEQ ID NO: 68081 - DNA, 40 bp, Homo sapiens
attttctaagaatgtaaacttctatttctgtttaaaaaaa

SEQ ID NO: 68082 - DNA, 40 bp, Homo sapiens
ttttttaaacagaaatagaagtttacattcttagaaaatt

SEQ ID NO: 68083 - DNA, 40 bp, Homo sapiens
aattttctaagaatgtaaacttctatttctgtttaaaaaa

SEQ ID NO: 68084 - DNA, 40 bp, Homo sapiens
tttttaaacagaaatagaagtttacattcttagaaaattt

SEQ ID NO: 68085 - DNA, 40 bp, Homo sapiens
aaattttctaagaatgtaaacttctatttctgtttaaaaa

SEQ ID NO: 68086 - DNA, 40 bp, Homo sapiens
ttttaaacagaaatagaagtttacattcttagaaaattta

SEQ ID NO: 68087 - DNA, 40 bp, Homo sapiens
taaattttctaagaatgtaaacttctatttctgtttaaaa

SEQ ID NO: 68088 - DNA, 40 bp, Homo sapiens
tttaaacagaaatagaagtttacattcttagaaaatttat

SEQ ID NO: 68089 - DNA, 40 bp, Homo sapiens
ataaattttctaagaatgtaaacttctatttctgtttaaa

SEQ ID NO: 68090 - DNA, 40 bp, Homo sapiens
ttaaacagaaatagaagtttacattcttagaaaatttatg

SEQ ID NO: 68091 - DNA, 40 bp, Homo sapiens
cataaattttctaagaatgtaaacttctatttctgtttaa

SEQ ID NO: 68092 - DNA, 40 bp, Homo sapiens
taaacagaaatagaagtttacattcttagaaaatttatga

SEQ ID NO: 68093 - DNA, 40 bp, Homo sapiens
tcataaattttctaagaatgtaaacttctatttctgttta

SEQ ID NO: 68094 - DNA, 40 bp, Homo sapiens
aaacagaaatagaagtttacattcttagaaaatttatgaa

SEQ ID NO: 68095 - DNA, 40 bp, Homo sapiens
ttcataaattttctaagaatgtaaacttctatttctgttt

SEQ ID NO: 68096 - DNA, 40 bp, Homo sapiens
aacagaaatagaagtttacattcttagaaaatttatgaaa

SEQ ID NO: 68097 - DNA, 40 bp, Homo sapiens
tttcataaattttctaagaatgtaaacttctatttctgtt

SEQ ID NO: 68098 - DNA, 40 bp, Homo sapiens
acagaaatagaagtttacattcttagaaaatttatgaaaa

SEQ ID NO: 68099 - DNA, 40 bp, Homo sapiens
ttttcataaattttctaagaatgtaaacttctatttctgt

SEQ ID NO: 68100 - DNA, 40 bp, Homo sapiens
cagaaatagaagtttacattcttagaaaatttatgaaaat

SEQ ID NO: 68101 - DNA, 40 bp, Homo sapiens
attttcataaattttctaagaatgtaaacttctatttctg

SEQ ID NO: 68102 - DNA, 40 bp, Homo sapiens
agaaatagaagtttacattcttagaaaatttatgaaaata

SEQ ID NO: 68103 - DNA, 40 bp, Homo sapiens
tattttcataaattttctaagaatgtaaacttctatttct

SEQ ID NO: 68104 - DNA, 40 bp, Homo sapiens
gaaatagaagtttacattcttagaaaatttatgaaaatat

SEQ ID NO: 68105 - DNA, 40 bp, Homo sapiens
atattttcataaattttctaagaatgtaaacttctatttc

SEQ ID NO: 68106 - DNA, 40 bp, Homo sapiens
aaatagaagtttacattcttagaaaatttatgaaaatatg

SEQ ID NO: 68107 - DNA, 40 bp, Homo sapiens
catattttcataaattttctaagaatgtaaacttctattt

SEQ ID NO: 68108 - DNA, 40 bp, Homo sapiens
aatagaagtttacattcttagaaaatttatgaaaatatga

SEQ ID NO: 68109 - DNA, 40 bp, Homo sapiens
tcatattttcataaattttctaagaatgtaaacttctatt

SEQ ID NO: 68110 - DNA, 40 bp, Homo sapiens
atagaagtttacattcttagaaaatttatgaaaatatgag

SEQ ID NO: 68111 - DNA, 40 bp, Homo sapiens
ctcatattttcataaattttctaagaatgtaaacttctat

SEQ ID NO: 68112 - DNA, 40 bp, Homo sapiens
tagaagtttacattcttagaaaatttatgaaaatatgagc

SEQ ID NO: 68113 - DNA, 40 bp, Homo sapiens
gctcatattttcataaattttctaagaatgtaaacttcta

SEQ ID NO: 68114 - DNA, 40 bp, Homo sapiens
agaagtttacattcttagaaaatttatgaaaatatgagct

SEQ ID NO: 68115 - DNA, 40 bp, Homo sapiens
agctcatattttcataaattttctaagaatgtaaacttct

SEQ ID NO: 68116 - DNA, 40 bp, Homo sapiens
gaagtttacattcttagaaaatttatgaaaatatgagctt

SEQ ID NO: 68117 - DNA, 40 bp, Homo sapiens
aagctcatattttcataaattttctaagaatgtaaacttc

SEQ ID NO: 68118 - DNA, 40 bp, Homo sapiens
aagtttacattcttagaaaatttatgaaaatatgagcttt

SEQ ID NO: 68119 - DNA, 40 bp, Homo sapiens
aaagctcatattttcataaattttctaagaatgtaaactt

SEQ ID NO: 68120 - DNA, 40 bp, Homo sapiens
agtttacattcttagaaaatttatgaaaatatgagctttt

SEQ ID NO: 68121 - DNA, 40 bp, Homo sapiens
aaaagctcatattttcataaattttctaagaatgtaaact

SEQ ID NO: 68122 - DNA, 40 bp, Homo sapiens
gtttacattcttagaaaatttatgaaaatatgagctttta

SEQ ID NO: 68123 - DNA, 40 bp, Homo sapiens
taaaagctcatattttcataaattttctaagaatgtaaac

SEQ ID NO: 68124 - DNA, 40 bp, Homo sapiens
tttacattcttagaaaatttatgaaaatatgagcttttac

SEQ ID NO: 68125 - DNA, 40 bp, Homo sapiens
gtaaaagctcatattttcataaattttctaagaatgtaaa

SEQ ID NO: 68126 - DNA, 40 bp, Homo sapiens
ttacattcttagaaaatttatgaaaatatgagcttttacc

SEQ ID NO: 68127 - DNA, 40 bp, Homo sapiens
ggtaaaagctcatattttcataaattttctaagaatgtaa

SEQ ID NO: 68128 - DNA, 40 bp, Homo sapiens
tacattcttagaaaatttatgaaaatatgagcttttacct

SEQ ID NO: 68129 - DNA, 40 bp, Homo sapiens
aggtaaaagctcatattttcataaattttctaagaatgta

SEQ ID NO: 68130 - DNA, 40 bp, Homo sapiens
acattcttagaaaatttatgaaaatatgagcttttacctg

SEQ ID NO: 68131 - DNA, 40 bp, Homo sapiens
caggtaaaagctcatattttcataaattttctaagaatgt

SEQ ID NO: 68132 - DNA, 40 bp, Homo sapiens
cattcttagaaaatttatgaaaatatgagcttttacctgg

SEQ ID NO: 68133 - DNA, 40 bp, Homo sapiens
ccaggtaaaagctcatattttcataaattttctaagaatg

SEQ ID NO: 68134 - DNA, 40 bp, Homo sapiens
attcttagaaaatttatgaaaatatgagcttttacctggt

SEQ ID NO: 68135 - DNA, 40 bp, Homo sapiens
accaggtaaaagctcatattttcataaattttctaagaat

SEQ ID NO: 68136 - DNA, 40 bp, Homo sapiens
ttcttagaaaatttatgaaaatatgagcttttacctggtt

SEQ ID NO: 68137 - DNA, 40 bp, Homo sapiens
aaccaggtaaaagctcatattttcataaattttctaagaa

SEQ ID NO: 68138 - DNA, 40 bp, Homo sapiens
tcttagaaaatttatgaaaatatgagcttttacctggttt

SEQ ID NO: 68139 - DNA, 40 bp, Homo sapiens
aaaccaggtaaaagctcatattttcataaattttctaaga

SEQ ID NO: 68140 - DNA, 40 bp, Homo sapiens
cttagaaaatttatgaaaatatgagcttttacctggtttg

SEQ ID NO: 68141 - DNA, 40 bp, Homo sapiens
caaaccaggtaaaagctcatattttcataaattttctaag

SEQ ID NO: 68142 - DNA, 40 bp, Homo sapiens
ttagaaaatttatgaaaatatgagcttttacctggtttgt

SEQ ID NO: 68143 - DNA, 40 bp, Homo sapiens
acaaaccaggtaaaagctcatattttcataaattttctaa

SEQ ID NO: 68144 - DNA, 40 bp, Homo sapiens
tagaaaatttatgaaaatatgagcttttacctggtttgtg

SEQ ID NO: 68145 - DNA, 40 bp, Homo sapiens
cacaaaccaggtaaaagctcatattttcataaattttcta

SEQ ID NO: 68146 - DNA, 40 bp, Homo sapiens
agaaaatttatgaaaatatgagcttttacctggtttgtgt

SEQ ID NO: 68147 - DNA, 40 bp, Homo sapiens
acacaaaccaggtaaaagctcatattttcataaattttct

SEQ ID NO: 68148 - DNA, 40 bp, Homo sapiens
gaaaatttatgaaaatatgagcttttacctggtttgtgtg

SEQ ID NO: 68149 - DNA, 40 bp, Homo sapiens
cacacaaaccaggtaaaagctcatattttcataaattttc

SEQ ID NO: 68150 - DNA, 40 bp, Homo sapiens
aaaatttatgaaaatatgagcttttacctggtttgtgtgt

SEQ ID NO: 68151 - DNA, 40 bp, Homo sapiens
acacacaaaccaggtaaaagctcatattttcataaatttt

SEQ ID NO: 68152 - DNA, 40 bp, Homo sapiens
aaatttatgaaaatatgagcttttacctggtttgtgtgtg

SEQ ID NO: 68153 - DNA, 40 bp, Homo sapiens
cacacacaaaccaggtaaaagctcatattttcataaattt

SEQ ID NO: 68154 - DNA, 40 bp, Homo sapiens
aatttatgaaaatatgagcttttacctggtttgtgtgtgt

SEQ ID NO: 68155 - DNA, 40 bp, Homo sapiens
acacacacaaaccaggtaaaagctcatattttcataaatt

SEQ ID NO: 68156 - DNA, 40 bp, Homo sapiens
atttatgaaaatatgagcttttacctggtttgtgtgtgtg

SEQ ID NO: 68157 - DNA, 40 bp, Homo sapiens
cacacacacaaaccaggtaaaagctcatattttcataaat

SEQ ID NO: 68158 - DNA, 40 bp, Homo sapiens
tttatgaaaatatgagcttttacctggtttgtgtgtgtgc

SEQ ID NO: 68159 - DNA, 40 bp, Homo sapiens
gcacacacacaaaccaggtaaaagctcatattttcataaa

SEQ ID NO: 68160 - DNA, 40 bp, Homo sapiens
ttatgaaaatatgagcttttacctggtttgtgtgtgtgcg

SEQ ID NO: 68161 - DNA, 40 bp, Homo sapiens
cgcacacacacaaaccaggtaaaagctcatattttcataa

SEQ ID NO: 68162 - DNA, 40 bp, Homo sapiens
tatgaaaatatgagcttttacctggtttgtgtgtgtgcgt

SEQ ID NO: 68163 - DNA, 40 bp, Homo sapiens
acgcacacacacaaaccaggtaaaagctcatattttcata

SEQ ID NO: 68164 - DNA, 40 bp, Homo sapiens
atgaaaatatgagcttttacctggtttgtgtgtgtgcgta

SEQ ID NO: 68165 - DNA, 40 bp, Homo sapiens
tacgcacacacacaaaccaggtaaaagctcatattttcat

SEQ ID NO: 68166 - DNA, 40 bp, Homo sapiens
tgaaaatatgagcttttacctggtttgtgtgtgtgcgtat

SEQ ID NO: 68167 - DNA, 40 bp, Homo sapiens
atacgcacacacacaaaccaggtaaaagctcatattttca

SEQ ID NO: 68168 - DNA, 40 bp, Homo sapiens
gaaaatatgagcttttacctggtttgtgtgtgtgcgtata

SEQ ID NO: 68169 - DNA, 40 bp, Homo sapiens
tatacgcacacacacaaaccaggtaaaagctcatattttc

SEQ ID NO: 68170 - DNA, 40 bp, Homo sapiens
aaaatatgagcttttacctggtttgtgtgtgtgcgtatat

SEQ ID NO: 68171 - DNA, 40 bp, Homo sapiens
atatacgcacacacacaaaccaggtaaaagctcatatttt

SEQ ID NO: 68172 - DNA, 40 bp, Homo sapiens
aaatatgagcttttacctggtttgtgtgtgtgcgtatata

SEQ ID NO: 68173 - DNA, 40 bp, Homo sapiens
tatatacgcacacacacaaaccaggtaaaagctcatattt

SEQ ID NO: 68174 - DNA, 40 bp, Homo sapiens
aatatgagcttttacctggtttgtgtgtgtgcgtatatat

SEQ ID NO: 68175 - DNA, 40 bp, Homo sapiens
atatatacgcacacacacaaaccaggtaaaagctcatatt

SEQ ID NO: 68176 - DNA, 40 bp, Homo sapiens
atatgagcttttacctggtttgtgtgtgtgcgtatatata

SEQ ID NO: 68177 - DNA, 40 bp, Homo sapiens
tatatatacgcacacacacaaaccaggtaaaagctcatat

SEQ ID NO: 68178 - DNA, 40 bp, Homo sapiens
tatgagcttttacctggtttgtgtgtgtgcgtatatatat

SEQ ID NO: 68179 - DNA, 40 bp, Homo sapiens
atatatatacgcacacacacaaaccaggtaaaagctcata

SEQ ID NO: 68180 - DNA, 40 bp, Homo sapiens
atgagcttttacctggtttgtgtgtgtgcgtatatatata

SEQ ID NO: 68181 - DNA, 40 bp, Homo sapiens
tatatatatacgcacacacacaaaccaggtaaaagctcat

SEQ ID NO: 68182 - DNA, 40 bp, Homo sapiens
tgagcttttacctggtttgtgtgtgtgcgtatatatatac

SEQ ID NO: 68183 - DNA, 40 bp, Homo sapiens
gtatatatatacgcacacacacaaaccaggtaaaagctca

SEQ ID NO: 68184 - DNA, 40 bp, Homo sapiens
gagcttttacctggtttgtgtgtgtgcgtatatatataca

SEQ ID NO: 68185 - DNA, 40 bp, Homo sapiens
tgtatatatatacgcacacacacaaaccaggtaaaagctc

SEQ ID NO: 68186 - DNA, 40 bp, Homo sapiens
agcttttacctggtttgtgtgtgtgcgtatatatatacac

SEQ ID NO: 68187 - DNA, 40 bp, Homo sapiens
gtgtatatatatacgcacacacacaaaccaggtaaaagct

SEQ ID NO: 68188 - DNA, 40 bp, Homo sapiens
gcttttacctggtttgtgtgtgtgcgtatatatatacaca

SEQ ID NO: 68189 - DNA, 40 bp, Homo sapiens
tgtgtatatatatacgcacacacacaaaccaggtaaaagc

SEQ ID NO: 68190 - DNA, 40 bp, Homo sapiens
cttttacctggtttgtgtgtgtgcgtatatatatacacat

SEQ ID NO: 68191 - DNA, 40 bp, Homo sapiens
atgtgtatatatatacgcacacacacaaaccaggtaaaag

SEQ ID NO: 68192 - DNA, 40 bp, Homo sapiens
ttttacctggtttgtgtgtgtgcgtatatatatacacata

SEQ ID NO: 68193 - DNA, 40 bp, Homo sapiens
tatgtgtatatatatacgcacacacacaaaccaggtaaaa

SEQ ID NO: 68194 - DNA, 40 bp, Homo sapiens
tttacctggtttgtgtgtgtgcgtatatatatacacatat

SEQ ID NO: 68195 - DNA, 40 bp, Homo sapiens
atatgtgtatatatatacgcacacacacaaaccaggtaaa

SEQ ID NO: 68196 - DNA, 40 bp, Homo sapiens
ttacctggtttgtgtgtgtgcgtatatatatacacatatt

SEQ ID NO: 68197 - DNA, 40 bp, Homo sapiens
aatatgtgtatatatatacgcacacacacaaaccaggtaa

SEQ ID NO: 68198 - DNA, 40 bp, Homo sapiens
tacctggtttgtgtgtgtgcgtatatatatacacatattt

SEQ ID NO: 68199 - DNA, 40 bp, Homo sapiens
aaatatgtgtatatatatacgcacacacacaaaccaggta

SEQ ID NO: 68200 - DNA, 40 bp, Homo sapiens
acctggtttgtgtgtgtgcgtatatatatacacatatttt

SEQ ID NO: 68201 - DNA, 40 bp, Homo sapiens
aaaatatgtgtatatatatacgcacacacacaaaccaggt

SEQ ID NO: 68202 - DNA, 40 bp, Homo sapiens
cctggtttgtgtgtgtgcgtatatatatacacatattttt

SEQ ID NO: 68203 - DNA, 40 bp, Homo sapiens
aaaaatatgtgtatatatatacgcacacacacaaaccagg

SEQ ID NO: 68204 - DNA, 40 bp, Homo sapiens
ctggtttgtgtgtgtgcgtatatatatacacatattttta

SEQ ID NO: 68205 - DNA, 40 bp, Homo sapiens
taaaaatatgtgtatatatatacgcacacacacaaaccag

SEQ ID NO: 68206 - DNA, 40 bp, Homo sapiens
tggtttgtgtgtgtgcgtatatatatacacatatttttaa

SEQ ID NO: 68207 - DNA, 40 bp, Homo sapiens
ttaaaaatatgtgtatatatatacgcacacacacaaacca

SEQ ID NO: 68208 - DNA, 40 bp, Homo sapiens
ggtttgtgtgtgtgcgtatatatatacacatatttttaaa

SEQ ID NO: 68209 - DNA, 40 bp, Homo sapiens
tttaaaaatatgtgtatatatatacgcacacacacaaacc

SEQ ID NO: 68210 - DNA, 40 bp, Homo sapiens
gtttgtgtgtgtgcgtatatatatacacatatttttaaat

SEQ ID NO: 68211 - DNA, 40 bp, Homo sapiens
atttaaaaatatgtgtatatatatacgcacacacacaaac

SEQ ID NO: 68212 - DNA, 40 bp, Homo sapiens
tttgtgtgtgtgcgtatatatatacacatatttttaaatt

SEQ ID NO: 68213 - DNA, 40 bp, Homo sapiens
aatttaaaaatatgtgtatatatatacgcacacacacaaa

SEQ ID NO: 68214 - DNA, 40 bp, Homo sapiens
ttgtgtgtgtgcgtatatatatacacatatttttaaattt

SEQ ID NO: 68215 - DNA, 40 bp, Homo sapiens
aaatttaaaaatatgtgtatatatatacgcacacacacaa

SEQ ID NO: 68216 - DNA, 40 bp, Homo sapiens
tgtgtgtgtgcgtatatatatacacatatttttaaatttc

SEQ ID NO: 68217 - DNA, 40 bp, Homo sapiens
gaaatttaaaaatatgtgtatatatatacgcacacacaca

SEQ ID NO: 68218 - DNA, 40 bp, Homo sapiens
gtgtgtgtgcgtatatatatacacatatttttaaatttct

SEQ ID NO: 68219 - DNA, 40 bp, Homo sapiens
agaaatttaaaaatatgtgtatatatatacgcacacacac

SEQ ID NO: 68220 - DNA, 40 bp, Homo sapiens
tgtgtgtgcgtatatatatacacatatttttaaatttctt

SEQ ID NO: 68221 - DNA, 40 bp, Homo sapiens
aagaaatttaaaaatatgtgtatatatatacgcacacaca

SEQ ID NO: 68222 - DNA, 40 bp, Homo sapiens
gtgtgtgcgtatatatatacacatatttttaaatttctta

SEQ ID NO: 68223 - DNA, 40 bp, Homo sapiens
taagaaatttaaaaatatgtgtatatatatacgcacacac

SEQ ID NO: 68224 - DNA, 40 bp, Homo sapiens
tgtgtgcgtatatatatacacatatttttaaatttcttac

SEQ ID NO: 68225 - DNA, 40 bp, Homo sapiens
gtaagaaatttaaaaatatgtgtatatatatacgcacaca

SEQ ID NO: 68226 - DNA, 40 bp, Homo sapiens
gtgtgcgtatatatatacacatatttttaaatttcttaca

SEQ ID NO: 68227 - DNA, 40 bp, Homo sapiens
tgtaagaaatttaaaaatatgtgtatatatatacgcacac

SEQ ID NO: 68228 - DNA, 40 bp, Homo sapiens
tgtgcgtatatatatacacatatttttaaatttcttacat

SEQ ID NO: 68229 - DNA, 40 bp, Homo sapiens
atgtaagaaatttaaaaatatgtgtatatatatacgcaca

SEQ ID NO: 68230 - DNA, 40 bp, Homo sapiens
gtgcgtatatatatacacatatttttaaatttcttacatt

SEQ ID NO: 68231 - DNA, 40 bp, Homo sapiens
aatgtaagaaatttaaaaatatgtgtatatatatacgcac

SEQ ID NO: 68232 - DNA, 40 bp, Homo sapiens
tgcgtatatatatacacatatttttaaatttcttacattg

SEQ ID NO: 68233 - DNA, 40 bp, Homo sapiens
caatgtaagaaatttaaaaatatgtgtatatatatacgca

SEQ ID NO: 68234 - DNA, 40 bp, Homo sapiens
gcgtatatatatacacatatttttaaatttcttacattga

SEQ ID NO: 68235 - DNA, 40 bp, Homo sapiens
tcaatgtaagaaatttaaaaatatgtgtatatatatacgc

SEQ ID NO: 68236 - DNA, 40 bp, Homo sapiens
cgtatatatatacacatatttttaaatttcttacattgat

SEQ ID NO: 68237 - DNA, 40 bp, Homo sapiens
atcaatgtaagaaatttaaaaatatgtgtatatatatacg

SEQ ID NO: 68238 - DNA, 40 bp, Homo sapiens
gtatatatatacacatatttttaaatttcttacattgatt

SEQ ID NO: 68239 - DNA, 40 bp, Homo sapiens
aatcaatgtaagaaatttaaaaatatgtgtatatatatac

SEQ ID NO: 68240 - DNA, 40 bp, Homo sapiens
tatatatatacacatatttttaaatttcttacattgattt

SEQ ID NO: 68241 - DNA, 40 bp, Homo sapiens
aaatcaatgtaagaaatttaaaaatatgtgtatatatata

SEQ ID NO: 68242 - DNA, 40 bp, Homo sapiens
atatatatacacatatttttaaatttcttacattgatttt

SEQ ID NO: 68243 - DNA, 40 bp, Homo sapiens
aaaatcaatgtaagaaatttaaaaatatgtgtatatatat

SEQ ID NO: 68244 - DNA, 40 bp, Homo sapiens
tatatatacacatatttttaaatttcttacattgattttc

SEQ ID NO: 68245 - DNA, 40 bp, Homo sapiens
gaaaatcaatgtaagaaatttaaaaatatgtgtatatata

SEQ ID NO: 68246 - DNA, 40 bp, Homo sapiens
atatatacacatatttttaaatttcttacattgattttca

SEQ ID NO: 68247 - DNA, 40 bp, Homo sapiens
tgaaaatcaatgtaagaaatttaaaaatatgtgtatatat

SEQ ID NO: 68248 - DNA, 40 bp, Homo sapiens
tatatacacatatttttaaatttcttacattgattttcaa

SEQ ID NO: 68249 - DNA, 40 bp, Homo sapiens
ttgaaaatcaatgtaagaaatttaaaaatatgtgtatata

SEQ ID NO: 68250 - DNA, 40 bp, Homo sapiens
atatacacatatttttaaatttcttacattgattttcaaa

SEQ ID NO: 68251 - DNA, 40 bp, Homo sapiens
tttgaaaatcaatgtaagaaatttaaaaatatgtgtatat

SEQ ID NO: 68252 - DNA, 40 bp, Homo sapiens
tatacacatatttttaaatttcttacattgattttcaaat

SEQ ID NO: 68253 - DNA, 40 bp, Homo sapiens
atttgaaaatcaatgtaagaaatttaaaaatatgtgtata

SEQ ID NO: 68254 - DNA, 40 bp, Homo sapiens
atacacatatttttaaatttcttacattgattttcaaatt

SEQ ID NO: 68255 - DNA, 40 bp, Homo sapiens
aatttgaaaatcaatgtaagaaatttaaaaatatgtgtat

SEQ ID NO: 68256 - DNA, 40 bp, Homo sapiens
tacacatatttttaaatttcttacattgattttcaaattg

SEQ ID NO: 68257 - DNA, 40 bp, Homo sapiens
caatttgaaaatcaatgtaagaaatttaaaaatatgtgta

SEQ ID NO: 68258 - DNA, 40 bp, Homo sapiens
acacatatttttaaatttcttacattgattttcaaattga

SEQ ID NO: 68259 - DNA, 40 bp, Homo sapiens
tcaatttgaaaatcaatgtaagaaatttaaaaatatgtgt

SEQ ID NO: 68260 - DNA, 40 bp, Homo sapiens
cacatatttttaaatttcttacattgattttcaaattgaa

SEQ ID NO: 68261 - DNA, 40 bp, Homo sapiens
ttcaatttgaaaatcaatgtaagaaatttaaaaatatgtg

SEQ ID NO: 68262 - DNA, 40 bp, Homo sapiens
acatatttttaaatttcttacattgattttcaaattgaaa

SEQ ID NO: 68263 - DNA, 40 bp, Homo sapiens
tttcaatttgaaaatcaatgtaagaaatttaaaaatatgt

SEQ ID NO: 68264 - DNA, 40 bp, Homo sapiens
catatttttaaatttcttacattgattttcaaattgaaag

SEQ ID NO: 68265 - DNA, 40 bp, Homo sapiens
ctttcaatttgaaaatcaatgtaagaaatttaaaaatatg

SEQ ID NO: 68266 - DNA, 40 bp, Homo sapiens
atatttttaaatttcttacattgattttcaaattgaaaga

SEQ ID NO: 68267 - DNA, 40 bp, Homo sapiens
tctttcaatttgaaaatcaatgtaagaaatttaaaaatat

SEQ ID NO: 68268 - DNA, 40 bp, Homo sapiens
tatttttaaatttcttacattgattttcaaattgaaagag

SEQ ID NO: 68269 - DNA, 40 bp, Homo sapiens
ctctttcaatttgaaaatcaatgtaagaaatttaaaaata

SEQ ID NO: 68270 - DNA, 40 bp, Homo sapiens
atttttaaatttcttacattgattttcaaattgaaagaga

SEQ ID NO: 68271 - DNA, 40 bp, Homo sapiens
tctctttcaatttgaaaatcaatgtaagaaatttaaaaat

SEQ ID NO: 68272 - DNA, 40 bp, Homo sapiens
tttttaaatttcttacattgattttcaaattgaaagagaa

SEQ ID NO: 68273 - DNA, 40 bp, Homo sapiens
ttctctttcaatttgaaaatcaatgtaagaaatttaaaaa

SEQ ID NO: 68274 - DNA, 40 bp, Homo sapiens
ttttaaatttcttacattgattttcaaattgaaagagaac

SEQ ID NO: 68275 - DNA, 40 bp, Homo sapiens
gttctctttcaatttgaaaatcaatgtaagaaatttaaaa

SEQ ID NO: 68276 - DNA, 40 bp, Homo sapiens
tttaaatttcttacattgattttcaaattgaaagagaacc

SEQ ID NO: 68277 - DNA, 40 bp, Homo sapiens
ggttctctttcaatttgaaaatcaatgtaagaaatttaaa

SEQ ID NO: 68278 - DNA, 40 bp, Homo sapiens
ttaaatttcttacattgattttcaaattgaaagagaacca

SEQ ID NO: 68279 - DNA, 40 bp, Homo sapiens
tggttctctttcaatttgaaaatcaatgtaagaaatttaa

SEQ ID NO: 68280 - DNA, 40 bp, Homo sapiens
taaatttcttacattgattttcaaattgaaagagaaccat

SEQ ID NO: 68281 - DNA, 40 bp, Homo sapiens
atggttctctttcaatttgaaaatcaatgtaagaaattta

SEQ ID NO: 68282 - DNA, 40 bp, Homo sapiens
aaatttcttacattgattttcaaattgaaagagaaccatt

SEQ ID NO: 68283 - DNA, 40 bp, Homo sapiens
aatggttctctttcaatttgaaaatcaatgtaagaaattt

SEQ ID NO: 68284 - DNA, 40 bp, Homo sapiens
aatttcttacattgattttcaaattgaaagagaaccattt

SEQ ID NO: 68285 - DNA, 40 bp, Homo sapiens
aaatggttctctttcaatttgaaaatcaatgtaagaaatt

SEQ ID NO: 68286 - DNA, 40 bp, Homo sapiens
atttcttacattgattttcaaattgaaagagaaccatttg

SEQ ID NO: 68287 - DNA, 40 bp, Homo sapiens
caaatggttctctttcaatttgaaaatcaatgtaagaaat

SEQ ID NO: 68288 - DNA, 40 bp, Homo sapiens
tttcttacattgattttcaaattgaaagagaaccatttgt

SEQ ID NO: 68289 - DNA, 40 bp, Homo sapiens
acaaatggttctctttcaatttgaaaatcaatgtaagaaa

SEQ ID NO: 68290 - DNA, 40 bp, Homo sapiens
ttcttacattgattttcaaattgaaagagaaccatttgtg

SEQ ID NO: 68291 - DNA, 40 bp, Homo sapiens
cacaaatggttctctttcaatttgaaaatcaatgtaagaa

SEQ ID NO: 68292 - DNA, 40 bp, Homo sapiens
tcttacattgattttcaaattgaaagagaaccatttgtga

SEQ ID NO: 68293 - DNA, 40 bp, Homo sapiens
tcacaaatggttctctttcaatttgaaaatcaatgtaaga

SEQ ID NO: 68294 - DNA, 40 bp, Homo sapiens
cttacattgattttcaaattgaaagagaaccatttgtgaa

SEQ ID NO: 68295 - DNA, 40 bp, Homo sapiens
ttcacaaatggttctctttcaatttgaaaatcaatgtaag

SEQ ID NO: 68296 - DNA, 40 bp, Homo sapiens
ttacattgattttcaaattgaaagagaaccatttgtgaaa

SEQ ID NO: 68297 - DNA, 40 bp, Homo sapiens
tttcacaaatggttctctttcaatttgaaaatcaatgtaa

SEQ ID NO: 68298 - DNA, 40 bp, Homo sapiens
tacattgattttcaaattgaaagagaaccatttgtgaaag

SEQ ID NO: 68299 - DNA, 40 bp, Homo sapiens
ctttcacaaatggttctctttcaatttgaaaatcaatgta

SEQ ID NO: 68300 - DNA, 40 bp, Homo sapiens
acattgattttcaaattgaaagagaaccatttgtgaaagt

SEQ ID NO: 68301 - DNA, 40 bp, Homo sapiens
actttcacaaatggttctctttcaatttgaaaatcaatgt

SEQ ID NO: 68302 - DNA, 40 bp, Homo sapiens
cattgattttcaaattgaaagagaaccatttgtgaaagta

SEQ ID NO: 68303 - DNA, 40 bp, Homo sapiens
tactttcacaaatggttctctttcaatttgaaaatcaatg

SEQ ID NO: 68304 - DNA, 40 bp, Homo sapiens
attgattttcaaattgaaagagaaccatttgtgaaagtat

SEQ ID NO: 68305 - DNA, 40 bp, Homo sapiens
atactttcacaaatggttctctttcaatttgaaaatcaat

SEQ ID NO: 68306 - DNA, 40 bp, Homo sapiens
ttgattttcaaattgaaagagaaccatttgtgaaagtatc

SEQ ID NO: 68307 - DNA, 40 bp, Homo sapiens
gatactttcacaaatggttctctttcaatttgaaaatcaa

SEQ ID NO: 68308 - DNA, 40 bp, Homo sapiens
tgattttcaaattgaaagagaaccatttgtgaaagtatct

SEQ ID NO: 68309 - DNA, 40 bp, Homo sapiens
agatactttcacaaatggttctctttcaatttgaaaatca

SEQ ID NO: 68310 - DNA, 40 bp, Homo sapiens
gattttcaaattgaaagagaaccatttgtgaaagtatctt

SEQ ID NO: 68311 - DNA, 40 bp, Homo sapiens
aagatactttcacaaatggttctctttcaatttgaaaatc

SEQ ID NO: 68312 - DNA, 40 bp, Homo sapiens
attttcaaattgaaagagaaccatttgtgaaagtatctta

SEQ ID NO: 68313 - DNA, 40 bp, Homo sapiens
taagatactttcacaaatggttctctttcaatttgaaaat

SEQ ID NO: 68314 - DNA, 40 bp, Homo sapiens
ttttcaaattgaaagagaaccatttgtgaaagtatcttaa

SEQ ID NO: 68315 - DNA, 40 bp, Homo sapiens
ttaagatactttcacaaatggttctctttcaatttgaaaa

SEQ ID NO: 68316 - DNA, 40 bp, Homo sapiens
tttcaaattgaaagagaaccatttgtgaaagtatcttaac

SEQ ID NO: 68317 - DNA, 40 bp, Homo sapiens
gttaagatactttcacaaatggttctctttcaatttgaaa

SEQ ID NO: 68318 - DNA, 40 bp, Homo sapiens
ttcaaattgaaagagaaccatttgtgaaagtatcttaaca

SEQ ID NO: 68319 - DNA, 40 bp, Homo sapiens
tgttaagatactttcacaaatggttctctttcaatttgaa

SEQ ID NO: 68320 - DNA, 40 bp, Homo sapiens
tcaaattgaaagagaaccatttgtgaaagtatcttaacag

SEQ ID NO: 68321 - DNA, 40 bp, Homo sapiens
ctgttaagatactttcacaaatggttctctttcaatttga

SEQ ID NO: 68322 - DNA, 40 bp, Homo sapiens
caaattgaaagagaaccatttgtgaaagtatcttaacaga

SEQ ID NO: 68323 - DNA, 40 bp, Homo sapiens
tctgttaagatactttcacaaatggttctctttcaatttg

SEQ ID NO: 68324 - DNA, 40 bp, Homo sapiens
aaattgaaagagaaccatttgtgaaagtatcttaacagag

SEQ ID NO: 68325 - DNA, 40 bp, Homo sapiens
ctctgttaagatactttcacaaatggttctctttcaattt

SEQ ID NO: 68326 - DNA, 40 bp, Homo sapiens
aattgaaagagaaccatttgtgaaagtatcttaacagagc

SEQ ID NO: 68327 - DNA, 40 bp, Homo sapiens
gctctgttaagatactttcacaaatggttctctttcaatt

SEQ ID NO: 68328 - DNA, 40 bp, Homo sapiens
attgaaagagaaccatttgtgaaagtatcttaacagagct

SEQ ID NO: 68329 - DNA, 40 bp, Homo sapiens
agctctgttaagatactttcacaaatggttctctttcaat

SEQ ID NO: 68330 - DNA, 40 bp, Homo sapiens
ttgaaagagaaccatttgtgaaagtatcttaacagagctc

SEQ ID NO: 68331 - DNA, 40 bp, Homo sapiens
gagctctgttaagatactttcacaaatggttctctttcaa

SEQ ID NO: 68332 - DNA, 40 bp, Homo sapiens
tgaaagagaaccatttgtgaaagtatcttaacagagctca

SEQ ID NO: 68333 - DNA, 40 bp, Homo sapiens
tgagctctgttaagatactttcacaaatggttctctttca

SEQ ID NO: 68334 - DNA, 40 bp, Homo sapiens
gaaagagaaccatttgtgaaagtatcttaacagagctcat

SEQ ID NO: 68335 - DNA, 40 bp, Homo sapiens
atgagctctgttaagatactttcacaaatggttctctttc

SEQ ID NO: 68336 - DNA, 40 bp, Homo sapiens
aaagagaaccatttgtgaaagtatcttaacagagctcatg

SEQ ID NO: 68337 - DNA, 40 bp, Homo sapiens
catgagctctgttaagatactttcacaaatggttctcttt

SEQ ID NO: 68338 - DNA, 40 bp, Homo sapiens
aagagaaccatttgtgaaagtatcttaacagagctcatgc

SEQ ID NO: 68339 - DNA, 40 bp, Homo sapiens
gcatgagctctgttaagatactttcacaaatggttctctt

SEQ ID NO: 68340 - DNA, 40 bp, Homo sapiens
agagaaccatttgtgaaagtatcttaacagagctcatgct

SEQ ID NO: 68341 - DNA, 40 bp, Homo sapiens
agcatgagctctgttaagatactttcacaaatggttctct

SEQ ID NO: 68342 - DNA, 40 bp, Homo sapiens
gagaaccatttgtgaaagtatcttaacagagctcatgctt

SEQ ID NO: 68343 - DNA, 40 bp, Homo sapiens
aagcatgagctctgttaagatactttcacaaatggttctc

SEQ ID NO: 68344 - DNA, 40 bp, Homo sapiens
agaaccatttgtgaaagtatcttaacagagctcatgcttt

SEQ ID NO: 68345 - DNA, 40 bp, Homo sapiens
aaagcatgagctctgttaagatactttcacaaatggttct

SEQ ID NO: 68346 - DNA, 40 bp, Homo sapiens
gaaccatttgtgaaagtatcttaacagagctcatgcttta

SEQ ID NO: 68347 - DNA, 40 bp, Homo sapiens
taaagcatgagctctgttaagatactttcacaaatggttc

SEQ ID NO: 68348 - DNA, 40 bp, Homo sapiens
aaccatttgtgaaagtatcttaacagagctcatgctttac

SEQ ID NO: 68349 - DNA, 40 bp, Homo sapiens
gtaaagcatgagctctgttaagatactttcacaaatggtt

SEQ ID NO: 68350 - DNA, 40 bp, Homo sapiens
accatttgtgaaagtatcttaacagagctcatgctttaca

SEQ ID NO: 68351 - DNA, 40 bp, Homo sapiens
tgtaaagcatgagctctgttaagatactttcacaaatggt

SEQ ID NO: 68352 - DNA, 40 bp, Homo sapiens
ccatttgtgaaagtatcttaacagagctcatgctttacat

SEQ ID NO: 68353 - DNA, 40 bp, Homo sapiens
atgtaaagcatgagctctgttaagatactttcacaaatgg

SEQ ID NO: 68354 - DNA, 40 bp, Homo sapiens
catttgtgaaagtatcttaacagagctcatgctttacatt

SEQ ID NO: 68355 - DNA, 40 bp, Homo sapiens
aatgtaaagcatgagctctgttaagatactttcacaaatg

SEQ ID NO: 68356 - DNA, 40 bp, Homo sapiens
atttgtgaaagtatcttaacagagctcatgctttacattt

SEQ ID NO: 68357 - DNA, 40 bp, Homo sapiens
aaatgtaaagcatgagctctgttaagatactttcacaaat

SEQ ID NO: 68358 - DNA, 40 bp, Homo sapiens
tttgtgaaagtatcttaacagagctcatgctttacatttt

SEQ ID NO: 68359 - DNA, 40 bp, Homo sapiens
aaaatgtaaagcatgagctctgttaagatactttcacaaa

SEQ ID NO: 68360 - DNA, 40 bp, Homo sapiens
ttgtgaaagtatcttaacagagctcatgctttacatttta

SEQ ID NO: 68361 - DNA, 40 bp, Homo sapiens
taaaatgtaaagcatgagctctgttaagatactttcacaa

SEQ ID NO: 68362 - DNA, 40 bp, Homo sapiens
tgtgaaagtatcttaacagagctcatgctttacattttac

SEQ ID NO: 68363 - DNA, 40 bp, Homo sapiens
gtaaaatgtaaagcatgagctctgttaagatactttcaca

SEQ ID NO: 68364 - DNA, 40 bp, Homo sapiens
gtgaaagtatcttaacagagctcatgctttacattttaca

SEQ ID NO: 68365 - DNA, 40 bp, Homo sapiens
tgtaaaatgtaaagcatgagctctgttaagatactttcac

SEQ ID NO: 68366 - DNA, 40 bp, Homo sapiens
tgaaagtatcttaacagagctcatgctttacattttacat

SEQ ID NO: 68367 - DNA, 40 bp, Homo sapiens
atgtaaaatgtaaagcatgagctctgttaagatactttca

SEQ ID NO: 68368 - DNA, 40 bp, Homo sapiens
gaaagtatcttaacagagctcatgctttacattttacatg

SEQ ID NO: 68369 - DNA, 40 bp, Homo sapiens
catgtaaaatgtaaagcatgagctctgttaagatactttc

SEQ ID NO: 68370 - DNA, 40 bp, Homo sapiens
aaagtatcttaacagagctcatgctttacattttacatgc

SEQ ID NO: 68371 - DNA, 40 bp, Homo sapiens
gcatgtaaaatgtaaagcatgagctctgttaagatacttt

SEQ ID NO: 68372 - DNA, 40 bp, Homo sapiens
aagtatcttaacagagctcatgctttacattttacatgct

SEQ ID NO: 68373 - DNA, 40 bp, Homo sapiens
agcatgtaaaatgtaaagcatgagctctgttaagatactt

SEQ ID NO: 68374 - DNA, 40 bp, Homo sapiens
agtatcttaacagagctcatgctttacattttacatgcta

SEQ ID NO: 68375 - DNA, 40 bp, Homo sapiens
tagcatgtaaaatgtaaagcatgagctctgttaagatact

SEQ ID NO: 68376 - DNA, 40 bp, Homo sapiens
gtatcttaacagagctcatgctttacattttacatgctac

SEQ ID NO: 68377 - DNA, 40 bp, Homo sapiens
gtagcatgtaaaatgtaaagcatgagctctgttaagatac

SEQ ID NO: 68378 - DNA, 40 bp, Homo sapiens
tatcttaacagagctcatgctttacattttacatgctaca

SEQ ID NO: 68379 - DNA, 40 bp, Homo sapiens
tgtagcatgtaaaatgtaaagcatgagctctgttaagata

SEQ ID NO: 68380 - DNA, 40 bp, Homo sapiens
atcttaacagagctcatgctttacattttacatgctacaa

SEQ ID NO: 68381 - DNA, 40 bp, Homo sapiens
ttgtagcatgtaaaatgtaaagcatgagctctgttaagat

SEQ ID NO: 68382 - DNA, 40 bp, Homo sapiens
tcttaacagagctcatgctttacattttacatgctacaaa

SEQ ID NO: 68383 - DNA, 40 bp, Homo sapiens
tttgtagcatgtaaaatgtaaagcatgagctctgttaaga

SEQ ID NO: 68384 - DNA, 40 bp, Homo sapiens
cttaacagagctcatgctttacattttacatgctacaaag

SEQ ID NO: 68385 - DNA, 40 bp, Homo sapiens
ctttgtagcatgtaaaatgtaaagcatgagctctgttaag

SEQ ID NO: 68386 - DNA, 40 bp, Homo sapiens
ttaacagagctcatgctttacattttacatgctacaaagt

SEQ ID NO: 68387 - DNA, 40 bp, Homo sapiens
actttgtagcatgtaaaatgtaaagcatgagctctgttaa

SEQ ID NO: 68388 - DNA, 40 bp, Homo sapiens
taacagagctcatgctttacattttacatgctacaaagtt

SEQ ID NO: 68389 - DNA, 40 bp, Homo sapiens
aactttgtagcatgtaaaatgtaaagcatgagctctgtta

SEQ ID NO: 68390 - DNA, 40 bp, Homo sapiens
aacagagctcatgctttacattttacatgctacaaagtta

SEQ ID NO: 68391 - DNA, 40 bp, Homo sapiens
taactttgtagcatgtaaaatgtaaagcatgagctctgtt

SEQ ID NO: 68392 - DNA, 40 bp, Homo sapiens
acagagctcatgctttacattttacatgctacaaagttat

SEQ ID NO: 68393 - DNA, 40 bp, Homo sapiens
ataactttgtagcatgtaaaatgtaaagcatgagctctgt

SEQ ID NO: 68394 - DNA, 40 bp, Homo sapiens
cagagctcatgctttacattttacatgctacaaagttatt

SEQ ID NO: 68395 - DNA, 40 bp, Homo sapiens
aataactttgtagcatgtaaaatgtaaagcatgagctctg

SEQ ID NO: 68396 - DNA, 40 bp, Homo sapiens
agagctcatgctttacattttacatgctacaaagttattt

SEQ ID NO: 68397 - DNA, 40 bp, Homo sapiens
aaataactttgtagcatgtaaaatgtaaagcatgagctct

SEQ ID NO: 68398 - DNA, 40 bp, Homo sapiens
gagctcatgctttacattttacatgctacaaagttatttt

SEQ ID NO: 68399 - DNA, 40 bp, Homo sapiens
aaaataactttgtagcatgtaaaatgtaaagcatgagctc

SEQ ID NO: 68400 - DNA, 40 bp, Homo sapiens
agctcatgctttacattttacatgctacaaagttatttta

SEQ ID NO: 68401 - DNA, 40 bp, Homo sapiens
taaaataactttgtagcatgtaaaatgtaaagcatgagct

SEQ ID NO: 68402 - DNA, 40 bp, Homo sapiens
gctcatgctttacattttacatgctacaaagttattttag

SEQ ID NO: 68403 - DNA, 40 bp, Homo sapiens
ctaaaataactttgtagcatgtaaaatgtaaagcatgagc

SEQ ID NO: 68404 - DNA, 40 bp, Homo sapiens
ctcatgctttacattttacatgctacaaagttattttagt

SEQ ID NO: 68405 - DNA, 40 bp, Homo sapiens
actaaaataactttgtagcatgtaaaatgtaaagcatgag

SEQ ID NO: 68406 - DNA, 40 bp, Homo sapiens
tcatgctttacattttacatgctacaaagttattttagtg

SEQ ID NO: 68407 - DNA, 40 bp, Homo sapiens
cactaaaataactttgtagcatgtaaaatgtaaagcatga

SEQ ID NO: 68408 - DNA, 40 bp, Homo sapiens
catgctttacattttacatgctacaaagttattttagtgc

SEQ ID NO: 68409 - DNA, 40 bp, Homo sapiens
gcactaaaataactttgtagcatgtaaaatgtaaagcatg

SEQ ID NO: 68410 - DNA, 40 bp, Homo sapiens
atgctttacattttacatgctacaaagttattttagtgcc

SEQ ID NO: 68411 - DNA, 40 bp, Homo sapiens
ggcactaaaataactttgtagcatgtaaaatgtaaagcat

SEQ ID NO: 68412 - DNA, 40 bp, Homo sapiens
tgctttacattttacatgctacaaagttattttagtgcct

SEQ ID NO: 68413 - DNA, 40 bp, Homo sapiens
aggcactaaaataactttgtagcatgtaaaatgtaaagca

SEQ ID NO: 68414 - DNA, 40 bp, Homo sapiens
gctttacattttacatgctacaaagttattttagtgcctt

SEQ ID NO: 68415 - DNA, 40 bp, Homo sapiens
aaggcactaaaataactttgtagcatgtaaaatgtaaagc

SEQ ID NO: 68416 - DNA, 40 bp, Homo sapiens
ctttacattttacatgctacaaagttattttagtgcctta

SEQ ID NO: 68417 - DNA, 40 bp, Homo sapiens
taaggcactaaaataactttgtagcatgtaaaatgtaaag

SEQ ID NO: 68418 - DNA, 40 bp, Homo sapiens
tttacattttacatgctacaaagttattttagtgccttaa

SEQ ID NO: 68419 - DNA, 40 bp, Homo sapiens
ttaaggcactaaaataactttgtagcatgtaaaatgtaaa

SEQ ID NO: 68420 - DNA, 40 bp, Homo sapiens
ttacattttacatgctacaaagttattttagtgccttaaa

SEQ ID NO: 68421 - DNA, 40 bp, Homo sapiens
tttaaggcactaaaataactttgtagcatgtaaaatgtaa

SEQ ID NO: 68422 - DNA, 40 bp, Homo sapiens
tacattttacatgctacaaagttattttagtgccttaaat

SEQ ID NO: 68423 - DNA, 40 bp, Homo sapiens
atttaaggcactaaaataactttgtagcatgtaaaatgta

SEQ ID NO: 68424 - DNA, 40 bp, Homo sapiens
acattttacatgctacaaagttattttagtgccttaaatt

SEQ ID NO: 68425 - DNA, 40 bp, Homo sapiens
aatttaaggcactaaaataactttgtagcatgtaaaatgt

SEQ ID NO: 68426 - DNA, 40 bp, Homo sapiens
cattttacatgctacaaagttattttagtgccttaaatta

SEQ ID NO: 68427 - DNA, 40 bp, Homo sapiens
taatttaaggcactaaaataactttgtagcatgtaaaatg

SEQ ID NO: 68428 - DNA, 40 bp, Homo sapiens
attttacatgctacaaagttattttagtgccttaaattat

SEQ ID NO: 68429 - DNA, 40 bp, Homo sapiens
ataatttaaggcactaaaataactttgtagcatgtaaaat

SEQ ID NO: 68430 - DNA, 40 bp, Homo sapiens
ttttacatgctacaaagttattttagtgccttaaattatt

SEQ ID NO: 68431 - DNA, 40 bp, Homo sapiens
aataatttaaggcactaaaataactttgtagcatgtaaaa

SEQ ID NO: 68432 - DNA, 40 bp, Homo sapiens
tttacatgctacaaagttattttagtgccttaaattattt

SEQ ID NO: 68433 - DNA, 40 bp, Homo sapiens
aaataatttaaggcactaaaataactttgtagcatgtaaa

SEQ ID NO: 68434 - DNA, 40 bp, Homo sapiens
ttacatgctacaaagttattttagtgccttaaattattta

SEQ ID NO: 68435 - DNA, 40 bp, Homo sapiens
taaataatttaaggcactaaaataactttgtagcatgtaa

SEQ ID NO: 68436 - DNA, 40 bp, Homo sapiens
tacatgctacaaagttattttagtgccttaaattatttat

SEQ ID NO: 68437 - DNA, 40 bp, Homo sapiens
ataaataatttaaggcactaaaataactttgtagcatgta

SEQ ID NO: 68438 - DNA, 40 bp, Homo sapiens
acatgctacaaagttattttagtgccttaaattatttatg

SEQ ID NO: 68439 - DNA, 40 bp, Homo sapiens
cataaataatttaaggcactaaaataactttgtagcatgt

SEQ ID NO: 68440 - DNA, 40 bp, Homo sapiens
catgctacaaagttattttagtgccttaaattatttatgt

SEQ ID NO: 68441 - DNA, 40 bp, Homo sapiens
acataaataatttaaggcactaaaataactttgtagcatg

SEQ ID NO: 68442 - DNA, 40 bp, Homo sapiens
atgctacaaagttattttagtgccttaaattatttatgtt

SEQ ID NO: 68443 - DNA, 40 bp, Homo sapiens
aacataaataatttaaggcactaaaataactttgtagcat

SEQ ID NO: 68444 - DNA, 40 bp, Homo sapiens
tgctacaaagttattttagtgccttaaattatttatgttg

SEQ ID NO: 68445 - DNA, 40 bp, Homo sapiens
caacataaataatttaaggcactaaaataactttgtagca

SEQ ID NO: 68446 - DNA, 40 bp, Homo sapiens
gctacaaagttattttagtgccttaaattatttatgttgc

SEQ ID NO: 68447 - DNA, 40 bp, Homo sapiens
gcaacataaataatttaaggcactaaaataactttgtagc

SEQ ID NO: 68448 - DNA, 40 bp, Homo sapiens
ctacaaagttattttagtgccttaaattatttatgttgct

SEQ ID NO: 68449 - DNA, 40 bp, Homo sapiens
agcaacataaataatttaaggcactaaaataactttgtag

SEQ ID NO: 68450 - DNA, 40 bp, Homo sapiens
tacaaagttattttagtgccttaaattatttatgttgctt

SEQ ID NO: 68451 - DNA, 40 bp, Homo sapiens
aagcaacataaataatttaaggcactaaaataactttgta

SEQ ID NO: 68452 - DNA, 40 bp, Homo sapiens
acaaagttattttagtgccttaaattatttatgttgctta

SEQ ID NO: 68453 - DNA, 40 bp, Homo sapiens
taagcaacataaataatttaaggcactaaaataactttgt

SEQ ID NO: 68454 - DNA, 40 bp, Homo sapiens
caaagttattttagtgccttaaattatttatgttgcttat

SEQ ID NO: 68455 - DNA, 40 bp, Homo sapiens
ataagcaacataaataatttaaggcactaaaataactttg

SEQ ID NO: 68456 - DNA, 40 bp, Homo sapiens
aaagttattttagtgccttaaattatttatgttgcttatt

SEQ ID NO: 68457 - DNA, 40 bp, Homo sapiens
aataagcaacataaataatttaaggcactaaaataacttt

SEQ ID NO: 68458 - DNA, 40 bp, Homo sapiens
aagttattttagtgccttaaattatttatgttgcttatta

SEQ ID NO: 68459 - DNA, 40 bp, Homo sapiens
taataagcaacataaataatttaaggcactaaaataactt

SEQ ID NO: 68460 - DNA, 40 bp, Homo sapiens
agttattttagtgccttaaattatttatgttgcttattaa

SEQ ID NO: 68461 - DNA, 40 bp, Homo sapiens
ttaataagcaacataaataatttaaggcactaaaataact

SEQ ID NO: 68462 - DNA, 40 bp, Homo sapiens
gttattttagtgccttaaattatttatgttgcttattaat

SEQ ID NO: 68463 - DNA, 40 bp, Homo sapiens
attaataagcaacataaataatttaaggcactaaaataac

SEQ ID NO: 68464 - DNA, 40 bp, Homo sapiens
ttattttagtgccttaaattatttatgttgcttattaatg

SEQ ID NO: 68465 - DNA, 40 bp, Homo sapiens
cattaataagcaacataaataatttaaggcactaaaataa

SEQ ID NO: 68466 - DNA, 40 bp, Homo sapiens
tattttagtgccttaaattatttatgttgcttattaatga

SEQ ID NO: 68467 - DNA, 40 bp, Homo sapiens
tcattaataagcaacataaataatttaaggcactaaaata

SEQ ID NO: 68468 - DNA, 40 bp, Homo sapiens
attttagtgccttaaattatttatgttgcttattaatgaa

SEQ ID NO: 68469 - DNA, 40 bp, Homo sapiens
ttcattaataagcaacataaataatttaaggcactaaaat

SEQ ID NO: 68470 - DNA, 40 bp, Homo sapiens
ttttagtgccttaaattatttatgttgcttattaatgaaa

SEQ ID NO: 68471 - DNA, 40 bp, Homo sapiens
tttcattaataagcaacataaataatttaaggcactaaaa

SEQ ID NO: 68472 - DNA, 40 bp, Homo sapiens
tttagtgccttaaattatttatgttgcttattaatgaaaa

SEQ ID NO: 68473 - DNA, 40 bp, Homo sapiens
ttttcattaataagcaacataaataatttaaggcactaaa

SEQ ID NO: 68474 - DNA, 40 bp, Homo sapiens
ttagtgccttaaattatttatgttgcttattaatgaaaat

SEQ ID NO: 68475 - DNA, 40 bp, Homo sapiens
attttcattaataagcaacataaataatttaaggcactaa

SEQ ID NO: 68476 - DNA, 40 bp, Homo sapiens
tagtgccttaaattatttatgttgcttattaatgaaaatt

SEQ ID NO: 68477 - DNA, 40 bp, Homo sapiens
aattttcattaataagcaacataaataatttaaggcacta

SEQ ID NO: 68478 - DNA, 40 bp, Homo sapiens
agtgccttaaattatttatgttgcttattaatgaaaattt

SEQ ID NO: 68479 - DNA, 40 bp, Homo sapiens
aaattttcattaataagcaacataaataatttaaggcact

SEQ ID NO: 68480 - DNA, 40 bp, Homo sapiens
gtgccttaaattatttatgttgcttattaatgaaaatttt

SEQ ID NO: 68481 - DNA, 40 bp, Homo sapiens
aaaattttcattaataagcaacataaataatttaaggcac

SEQ ID NO: 68482 - DNA, 40 bp, Homo sapiens
tgccttaaattatttatgttgcttattaatgaaaattttg

SEQ ID NO: 68483 - DNA, 40 bp, Homo sapiens
caaaattttcattaataagcaacataaataatttaaggca

SEQ ID NO: 68484 - DNA, 40 bp, Homo sapiens
gccttaaattatttatgttgcttattaatgaaaattttgg

SEQ ID NO: 68485 - DNA, 40 bp, Homo sapiens
ccaaaattttcattaataagcaacataaataatttaaggc

SEQ ID NO: 68486 - DNA, 40 bp, Homo sapiens
ccttaaattatttatgttgcttattaatgaaaattttgga

SEQ ID NO: 68487 - DNA, 40 bp, Homo sapiens
tccaaaattttcattaataagcaacataaataatttaagg

SEQ ID NO: 68488 - DNA, 40 bp, Homo sapiens
cttaaattatttatgttgcttattaatgaaaattttggat

SEQ ID NO: 68489 - DNA, 40 bp, Homo sapiens
atccaaaattttcattaataagcaacataaataatttaag

SEQ ID NO: 68490 - DNA, 40 bp, Homo sapiens
ttaaattatttatgttgcttattaatgaaaattttggata

SEQ ID NO: 68491 - DNA, 40 bp, Homo sapiens
tatccaaaattttcattaataagcaacataaataatttaa

SEQ ID NO: 68492 - DNA, 40 bp, Homo sapiens
taaattatttatgttgcttattaatgaaaattttggatac

SEQ ID NO: 68493 - DNA, 40 bp, Homo sapiens
gtatccaaaattttcattaataagcaacataaataattta

SEQ ID NO: 68494 - DNA, 40 bp, Homo sapiens
aaattatttatgttgcttattaatgaaaattttggataca

SEQ ID NO: 68495 - DNA, 40 bp, Homo sapiens
tgtatccaaaattttcattaataagcaacataaataattt

SEQ ID NO: 68496 - DNA, 40 bp, Homo sapiens
aattatttatgttgcttattaatgaaaattttggatacat

SEQ ID NO: 68497 - DNA, 40 bp, Homo sapiens
atgtatccaaaattttcattaataagcaacataaataatt

SEQ ID NO: 68498 - DNA, 40 bp, Homo sapiens
attatttatgttgcttattaatgaaaattttggatacata

SEQ ID NO: 68499 - DNA, 40 bp, Homo sapiens
tatgtatccaaaattttcattaataagcaacataaataat

SEQ ID NO: 68500 - DNA, 40 bp, Homo sapiens
ttatttatgttgcttattaatgaaaattttggatacataa

SEQ ID NO: 68501 - DNA, 40 bp, Homo sapiens
ttatgtatccaaaattttcattaataagcaacataaataa

SEQ ID NO: 68502 - DNA, 40 bp, Homo sapiens
tatttatgttgcttattaatgaaaattttggatacataat

SEQ ID NO: 68503 - DNA, 40 bp, Homo sapiens
attatgtatccaaaattttcattaataagcaacataaata

SEQ ID NO: 68504 - DNA, 40 bp, Homo sapiens
atttatgttgcttattaatgaaaattttggatacataatt

SEQ ID NO: 68505 - DNA, 40 bp, Homo sapiens
aattatgtatccaaaattttcattaataagcaacataaat

SEQ ID NO: 68506 - DNA, 40 bp, Homo sapiens
tttatgttgcttattaatgaaaattttggatacataattt

SEQ ID NO: 68507 - DNA, 40 bp, Homo sapiens
aaattatgtatccaaaattttcattaataagcaacataaa

SEQ ID NO: 68508 - DNA, 40 bp, Homo sapiens
ttatgttgcttattaatgaaaattttggatacataatttt

SEQ ID NO: 68509 - DNA, 40 bp, Homo sapiens
aaaattatgtatccaaaattttcattaataagcaacataa

SEQ ID NO: 68510 - DNA, 40 bp, Homo sapiens
tatgttgcttattaatgaaaattttggatacataattttt

SEQ ID NO: 68511 - DNA, 40 bp, Homo sapiens
aaaaattatgtatccaaaattttcattaataagcaacata

SEQ ID NO: 68512 - DNA, 40 bp, Homo sapiens
atgttgcttattaatgaaaattttggatacataatttttt

SEQ ID NO: 68513 - DNA, 40 bp, Homo sapiens
aaaaaattatgtatccaaaattttcattaataagcaacat

SEQ ID NO: 68514 - DNA, 40 bp, Homo sapiens
tgttgcttattaatgaaaattttggatacataattttttc

SEQ ID NO: 68515 - DNA, 40 bp, Homo sapiens
gaaaaaattatgtatccaaaattttcattaataagcaaca

SEQ ID NO: 68516 - DNA, 40 bp, Homo sapiens
gttgcttattaatgaaaattttggatacataattttttca

SEQ ID NO: 68517 - DNA, 40 bp, Homo sapiens
tgaaaaaattatgtatccaaaattttcattaataagcaac

SEQ ID NO: 68518 - DNA, 40 bp, Homo sapiens
ttgcttattaatgaaaattttggatacataattttttcaa

SEQ ID NO: 68519 - DNA, 40 bp, Homo sapiens
ttgaaaaaattatgtatccaaaattttcattaataagcaa

SEQ ID NO: 68520 - DNA, 40 bp, Homo sapiens
tgcttattaatgaaaattttggatacataattttttcaag

SEQ ID NO: 68521 - DNA, 40 bp, Homo sapiens
cttgaaaaaattatgtatccaaaattttcattaataagca

SEQ ID NO: 68522 - DNA, 40 bp, Homo sapiens
gcttattaatgaaaattttggatacataattttttcaaga

SEQ ID NO: 68523 - DNA, 40 bp, Homo sapiens
tcttgaaaaaattatgtatccaaaattttcattaataagc

SEQ ID NO: 68524 - DNA, 40 bp, Homo sapiens
cttattaatgaaaattttggatacataattttttcaagac

SEQ ID NO: 68525 - DNA, 40 bp, Homo sapiens
gtcttgaaaaaattatgtatccaaaattttcattaataag

SEQ ID NO: 68526 - DNA, 40 bp, Homo sapiens
ttattaatgaaaattttggatacataattttttcaagaca

SEQ ID NO: 68527 - DNA, 40 bp, Homo sapiens
tgtcttgaaaaaattatgtatccaaaattttcattaataa

SEQ ID NO: 68528 - DNA, 40 bp, Homo sapiens
tattaatgaaaattttggatacataattttttcaagacaa

SEQ ID NO: 68529 - DNA, 40 bp, Homo sapiens
ttgtcttgaaaaaattatgtatccaaaattttcattaata

SEQ ID NO: 68530 - DNA, 40 bp, Homo sapiens
attaatgaaaattttggatacataattttttcaagacaaa

SEQ ID NO: 68531 - DNA, 40 bp, Homo sapiens
tttgtcttgaaaaaattatgtatccaaaattttcattaat

SEQ ID NO: 68532 - DNA, 40 bp, Homo sapiens
ttaatgaaaattttggatacataattttttcaagacaaag

SEQ ID NO: 68533 - DNA, 40 bp, Homo sapiens
ctttgtcttgaaaaaattatgtatccaaaattttcattaa

SEQ ID NO: 68534 - DNA, 40 bp, Homo sapiens
taatgaaaattttggatacataattttttcaagacaaagg

SEQ ID NO: 68535 - DNA, 40 bp, Homo sapiens
cctttgtcttgaaaaaattatgtatccaaaattttcatta

SEQ ID NO: 68536 - DNA, 40 bp, Homo sapiens
aatgaaaattttggatacataattttttcaagacaaaggt

SEQ ID NO: 68537 - DNA, 40 bp, Homo sapiens
acctttgtcttgaaaaaattatgtatccaaaattttcatt

SEQ ID NO: 68538 - DNA, 40 bp, Homo sapiens
atgaaaattttggatacataattttttcaagacaaaggta

SEQ ID NO: 68539 - DNA, 40 bp, Homo sapiens
tacctttgtcttgaaaaaattatgtatccaaaattttcat

SEQ ID NO: 68540 - DNA, 40 bp, Homo sapiens
tgaaaattttggatacataattttttcaagacaaaggtaa

SEQ ID NO: 68541 - DNA, 40 bp, Homo sapiens
ttacctttgtcttgaaaaaattatgtatccaaaattttca

SEQ ID NO: 68542 - DNA, 40 bp, Homo sapiens
gaaaattttggatacataattttttcaagacaaaggtaaa

SEQ ID NO: 68543 - DNA, 40 bp, Homo sapiens
tttacctttgtcttgaaaaaattatgtatccaaaattttc

SEQ ID NO: 68544 - DNA, 40 bp, Homo sapiens
aaaattttggatacataattttttcaagacaaaggtaaaa

SEQ ID NO: 68545 - DNA, 40 bp, Homo sapiens
ttttacctttgtcttgaaaaaattatgtatccaaaatttt

SEQ ID NO: 68546 - DNA, 40 bp, Homo sapiens
aaattttggatacataattttttcaagacaaaggtaaaaa

SEQ ID NO: 68547 - DNA, 40 bp, Homo sapiens
tttttacctttgtcttgaaaaaattatgtatccaaaattt

SEQ ID NO: 68548 - DNA, 40 bp, Homo sapiens
aattttggatacataattttttcaagacaaaggtaaaaat

SEQ ID NO: 68549 - DNA, 40 bp, Homo sapiens
atttttacctttgtcttgaaaaaattatgtatccaaaatt

SEQ ID NO: 68550 - DNA, 40 bp, Homo sapiens
attttggatacataattttttcaagacaaaggtaaaaata

SEQ ID NO: 68551 - DNA, 40 bp, Homo sapiens
tatttttacctttgtcttgaaaaaattatgtatccaaaat

SEQ ID NO: 68552 - DNA, 40 bp, Homo sapiens
ttttggatacataattttttcaagacaaaggtaaaaataa

SEQ ID NO: 68553 - DNA, 40 bp, Homo sapiens
ttatttttacctttgtcttgaaaaaattatgtatccaaaa

SEQ ID NO: 68554 - DNA, 40 bp, Homo sapiens
tttggatacataattttttcaagacaaaggtaaaaataat

SEQ ID NO: 68555 - DNA, 40 bp, Homo sapiens
attatttttacctttgtcttgaaaaaattatgtatccaaa

SEQ ID NO: 68556 - DNA, 40 bp, Homo sapiens
ttggatacataattttttcaagacaaaggtaaaaataata

SEQ ID NO: 68557 - DNA, 40 bp, Homo sapiens
tattatttttacctttgtcttgaaaaaattatgtatccaa

SEQ ID NO: 68558 - DNA, 40 bp, Homo sapiens
tggatacataattttttcaagacaaaggtaaaaataataa

SEQ ID NO: 68559 - DNA, 40 bp, Homo sapiens
ttattatttttacctttgtcttgaaaaaattatgtatcca

SEQ ID NO: 68560 - DNA, 40 bp, Homo sapiens
ggatacataattttttcaagacaaaggtaaaaataataaa

SEQ ID NO: 68561 - DNA, 40 bp, Homo sapiens
tttattatttttacctttgtcttgaaaaaattatgtatcc

SEQ ID NO: 68562 - DNA, 40 bp, Homo sapiens
gatacataattttttcaagacaaaggtaaaaataataaac

SEQ ID NO: 68563 - DNA, 40 bp, Homo sapiens
gtttattatttttacctttgtcttgaaaaaattatgtatc

SEQ ID NO: 68564 - DNA, 40 bp, Homo sapiens
atacataattttttcaagacaaaggtaaaaataataaacc

SEQ ID NO: 68565 - DNA, 40 bp, Homo sapiens
ggtttattatttttacctttgtcttgaaaaaattatgtat

SEQ ID NO: 68566 - DNA, 40 bp, Homo sapiens
tacataattttttcaagacaaaggtaaaaataataaaccc

SEQ ID NO: 68567 - DNA, 40 bp, Homo sapiens
gggtttattatttttacctttgtcttgaaaaaattatgta

SEQ ID NO: 68568 - DNA, 40 bp, Homo sapiens
acataattttttcaagacaaaggtaaaaataataaaccct

SEQ ID NO: 68569 - DNA, 40 bp, Homo sapiens
agggtttattatttttacctttgtcttgaaaaaattatgt

SEQ ID NO: 68570 - DNA, 40 bp, Homo sapiens
cataattttttcaagacaaaggtaaaaataataaaccctt

SEQ ID NO: 68571 - DNA, 40 bp, Homo sapiens
aagggtttattatttttacctttgtcttgaaaaaattatg

SEQ ID NO: 68572 - DNA, 40 bp, Homo sapiens
ataattttttcaagacaaaggtaaaaataataaacccttt

SEQ ID NO: 68573 - DNA, 40 bp, Homo sapiens
aaagggtttattatttttacctttgtcttgaaaaaattat

SEQ ID NO: 68574 - DNA, 40 bp, Homo sapiens
taattttttcaagacaaaggtaaaaataataaaccctttc

SEQ ID NO: 68575 - DNA, 40 bp, Homo sapiens
gaaagggtttattatttttacctttgtcttgaaaaaatta

SEQ ID NO: 68576 - DNA, 40 bp, Homo sapiens
aattttttcaagacaaaggtaaaaataataaaccctttcc

SEQ ID NO: 68577 - DNA, 40 bp, Homo sapiens
ggaaagggtttattatttttacctttgtcttgaaaaaatt

SEQ ID NO: 68578 - DNA, 40 bp, Homo sapiens
attttttcaagacaaaggtaaaaataataaaccctttcct

SEQ ID NO: 68579 - DNA, 40 bp, Homo sapiens
aggaaagggtttattatttttacctttgtcttgaaaaaat

SEQ ID NO: 68580 - DNA, 40 bp, Homo sapiens
ttttttcaagacaaaggtaaaaataataaaccctttcctt

SEQ ID NO: 68581 - DNA, 40 bp, Homo sapiens
aaggaaagggtttattatttttacctttgtcttgaaaaaa

SEQ ID NO: 68582 - DNA, 40 bp, Homo sapiens
tttttcaagacaaaggtaaaaataataaaccctttccttc

SEQ ID NO: 68583 - DNA, 40 bp, Homo sapiens
gaaggaaagggtttattatttttacctttgtcttgaaaaa

SEQ ID NO: 68584 - DNA, 40 bp, Homo sapiens
ttttcaagacaaaggtaaaaataataaaccctttccttct

SEQ ID NO: 68585 - DNA, 40 bp, Homo sapiens
agaaggaaagggtttattatttttacctttgtcttgaaaa

SEQ ID NO: 68586 - DNA, 40 bp, Homo sapiens
tttcaagacaaaggtaaaaataataaaccctttccttctg

SEQ ID NO: 68587 - DNA, 40 bp, Homo sapiens
cagaaggaaagggtttattatttttacctttgtcttgaaa

SEQ ID NO: 68588 - DNA, 40 bp, Homo sapiens
ttcaagacaaaggtaaaaataataaaccctttccttctga

SEQ ID NO: 68589 - DNA, 40 bp, Homo sapiens
tcagaaggaaagggtttattatttttacctttgtcttgaa

SEQ ID NO: 68590 - DNA, 40 bp, Homo sapiens
tcaagacaaaggtaaaaataataaaccctttccttctgag

SEQ ID NO: 68591 - DNA, 40 bp, Homo sapiens
ctcagaaggaaagggtttattatttttacctttgtcttga

SEQ ID NO: 68592 - DNA, 40 bp, Homo sapiens
caagacaaaggtaaaaataataaaccctttccttctgagg

SEQ ID NO: 68593 - DNA, 40 bp, Homo sapiens
cctcagaaggaaagggtttattatttttacctttgtcttg

SEQ ID NO: 68594 - DNA, 40 bp, Homo sapiens
aagacaaaggtaaaaataataaaccctttccttctgagga

SEQ ID NO: 68595 - DNA, 40 bp, Homo sapiens
tcctcagaaggaaagggtttattatttttacctttgtctt

SEQ ID NO: 68596 - DNA, 40 bp, Homo sapiens
agacaaaggtaaaaataataaaccctttccttctgaggat

SEQ ID NO: 68597 - DNA, 40 bp, Homo sapiens
atcctcagaaggaaagggtttattatttttacctttgtct

SEQ ID NO: 68598 - DNA, 40 bp, Homo sapiens
gacaaaggtaaaaataataaaccctttccttctgaggatt

SEQ ID NO: 68599 - DNA, 40 bp, Homo sapiens
aatcctcagaaggaaagggtttattatttttacctttgtc

SEQ ID NO: 68600 - DNA, 40 bp, Homo sapiens
acaaaggtaaaaataataaaccctttccttctgaggatta

SEQ ID NO: 68601 - DNA, 40 bp, Homo sapiens
taatcctcagaaggaaagggtttattatttttacctttgt

SEQ ID NO: 68602 - DNA, 40 bp, Homo sapiens
caaaggtaaaaataataaaccctttccttctgaggattaa

SEQ ID NO: 68603 - DNA, 40 bp, Homo sapiens
ttaatcctcagaaggaaagggtttattatttttacctttg

SEQ ID NO: 68604 - DNA, 40 bp, Homo sapiens
aaaggtaaaaataataaaccctttccttctgaggattaat

SEQ ID NO: 68605 - DNA, 40 bp, Homo sapiens
attaatcctcagaaggaaagggtttattatttttaccttt

SEQ ID NO: 68606 - DNA, 40 bp, Homo sapiens
aaggtaaaaataataaaccctttccttctgaggattaatg

SEQ ID NO: 68607 - DNA, 40 bp, Homo sapiens
cattaatcctcagaaggaaagggtttattatttttacctt

SEQ ID NO: 68608 - DNA, 40 bp, Homo sapiens
aggtaaaaataataaaccctttccttctgaggattaatga

SEQ ID NO: 68609 - DNA, 40 bp, Homo sapiens
tcattaatcctcagaaggaaagggtttattatttttacct

SEQ ID NO: 68610 - DNA, 40 bp, Homo sapiens
ggtaaaaataataaaccctttccttctgaggattaatgat

SEQ ID NO: 68611 - DNA, 40 bp, Homo sapiens
atcattaatcctcagaaggaaagggtttattatttttacc

SEQ ID NO: 68612 - DNA, 40 bp, Homo sapiens
gtaaaaataataaaccctttccttctgaggattaatgata

SEQ ID NO: 68613 - DNA, 40 bp, Homo sapiens
tatcattaatcctcagaaggaaagggtttattatttttac

SEQ ID NO: 68614 - DNA, 40 bp, Homo sapiens
taaaaataataaaccctttccttctgaggattaatgataa

SEQ ID NO: 68615 - DNA, 40 bp, Homo sapiens
ttatcattaatcctcagaaggaaagggtttattattttta

SEQ ID NO: 68616 - DNA, 40 bp, Homo sapiens
aaaaataataaaccctttccttctgaggattaatgataaa

SEQ ID NO: 68617 - DNA, 40 bp, Homo sapiens
tttatcattaatcctcagaaggaaagggtttattattttt

SEQ ID NO: 68618 - DNA, 40 bp, Homo sapiens
aaaataataaaccctttccttctgaggattaatgataaat

SEQ ID NO: 68619 - DNA, 40 bp, Homo sapiens
atttatcattaatcctcagaaggaaagggtttattatttt

SEQ ID NO: 68620 - DNA, 40 bp, Homo sapiens
aaataataaaccctttccttctgaggattaatgataaata

SEQ ID NO: 68621 - DNA, 40 bp, Homo sapiens
tatttatcattaatcctcagaaggaaagggtttattattt

SEQ ID NO: 68622 - DNA, 40 bp, Homo sapiens
aataataaaccctttccttctgaggattaatgataaatat

SEQ ID NO: 68623 - DNA, 40 bp, Homo sapiens
atatttatcattaatcctcagaaggaaagggtttattatt

SEQ ID NO: 68624 - DNA, 40 bp, Homo sapiens
ataataaaccctttccttctgaggattaatgataaatata

SEQ ID NO: 68625 - DNA, 40 bp, Homo sapiens
tatatttatcattaatcctcagaaggaaagggtttattat

SEQ ID NO: 68626 - DNA, 40 bp, Homo sapiens
taataaaccctttccttctgaggattaatgataaatataa

SEQ ID NO: 68627 - DNA, 40 bp, Homo sapiens
ttatatttatcattaatcctcagaaggaaagggtttatta

SEQ ID NO: 68628 - DNA, 40 bp, Homo sapiens
aataaaccctttccttctgaggattaatgataaatataaa

SEQ ID NO: 68629 - DNA, 40 bp, Homo sapiens
tttatatttatcattaatcctcagaaggaaagggtttatt

SEQ ID NO: 68630 - DNA, 40 bp, Homo sapiens
ataaaccctttccttctgaggattaatgataaatataaac

SEQ ID NO: 68631 - DNA, 40 bp, Homo sapiens
gtttatatttatcattaatcctcagaaggaaagggtttat

SEQ ID NO: 68632 - DNA, 40 bp, Homo sapiens
taaaccctttccttctgaggattaatgataaatataaact

SEQ ID NO: 68633 - DNA, 40 bp, Homo sapiens
agtttatatttatcattaatcctcagaaggaaagggttta

SEQ ID NO: 68634 - DNA, 40 bp, Homo sapiens
aaaccctttccttctgaggattaatgataaatataaactt

SEQ ID NO: 68635 - DNA, 40 bp, Homo sapiens
aagtttatatttatcattaatcctcagaaggaaagggttt

SEQ ID NO: 68636 - DNA, 40 bp, Homo sapiens
aaccctttccttctgaggattaatgataaatataaacttt

SEQ ID NO: 68637 - DNA, 40 bp, Homo sapiens
aaagtttatatttatcattaatcctcagaaggaaagggtt

SEQ ID NO: 68638 - DNA, 40 bp, Homo sapiens
accctttccttctgaggattaatgataaatataaacttta

SEQ ID NO: 68639 - DNA, 40 bp, Homo sapiens
taaagtttatatttatcattaatcctcagaaggaaagggt

SEQ ID NO: 68640 - DNA, 40 bp, Homo sapiens
ccctttccttctgaggattaatgataaatataaactttaa

SEQ ID NO: 68641 - DNA, 40 bp, Homo sapiens
ttaaagtttatatttatcattaatcctcagaaggaaaggg

SEQ ID NO: 68642 - DNA, 40 bp, Homo sapiens
cctttccttctgaggattaatgataaatataaactttaaa

SEQ ID NO: 68643 - DNA, 40 bp, Homo sapiens
tttaaagtttatatttatcattaatcctcagaaggaaagg

SEQ ID NO: 68644 - DNA, 40 bp, Homo sapiens
ctttccttctgaggattaatgataaatataaactttaaaa

SEQ ID NO: 68645 - DNA, 40 bp, Homo sapiens
ttttaaagtttatatttatcattaatcctcagaaggaaag

SEQ ID NO: 68646 - DNA, 40 bp, Homo sapiens
tttccttctgaggattaatgataaatataaactttaaaac

SEQ ID NO: 68647 - DNA, 40 bp, Homo sapiens
gttttaaagtttatatttatcattaatcctcagaaggaaa

SEQ ID NO: 68648 - DNA, 40 bp, Homo sapiens
ttccttctgaggattaatgataaatataaactttaaaacg

SEQ ID NO: 68649 - DNA, 40 bp, Homo sapiens
cgttttaaagtttatatttatcattaatcctcagaaggaa

SEQ ID NO: 68650 - DNA, 40 bp, Homo sapiens
tccttctgaggattaatgataaatataaactttaaaacga

SEQ ID NO: 68651 - DNA, 40 bp, Homo sapiens
tcgttttaaagtttatatttatcattaatcctcagaagga

SEQ ID NO: 68652 - DNA, 40 bp, Homo sapiens
ccttctgaggattaatgataaatataaactttaaaacgat

SEQ ID NO: 68653 - DNA, 40 bp, Homo sapiens
atcgttttaaagtttatatttatcattaatcctcagaagg

SEQ ID NO: 68654 - DNA, 40 bp, Homo sapiens
cttctgaggattaatgataaatataaactttaaaacgatt

SEQ ID NO: 68655 - DNA, 40 bp, Homo sapiens
aatcgttttaaagtttatatttatcattaatcctcagaag

SEQ ID NO: 68656 - DNA, 40 bp, Homo sapiens
ttctgaggattaatgataaatataaactttaaaacgatta

SEQ ID NO: 68657 - DNA, 40 bp, Homo sapiens
taatcgttttaaagtttatatttatcattaatcctcagaa

SEQ ID NO: 68658 - DNA, 40 bp, Homo sapiens
tctgaggattaatgataaatataaactttaaaacgattaa

SEQ ID NO: 68659 - DNA, 40 bp, Homo sapiens
ttaatcgttttaaagtttatatttatcattaatcctcaga

SEQ ID NO: 68660 - DNA, 40 bp, Homo sapiens
ctgaggattaatgataaatataaactttaaaacgattaaa

SEQ ID NO: 68661 - DNA, 40 bp, Homo sapiens
tttaatcgttttaaagtttatatttatcattaatcctcag

SEQ ID NO: 68662 - DNA, 40 bp, Homo sapiens
tgaggattaatgataaatataaactttaaaacgattaaaa

SEQ ID NO: 68663 - DNA, 40 bp, Homo sapiens
ttttaatcgttttaaagtttatatttatcattaatcctca

SEQ ID NO: 68664 - DNA, 40 bp, Homo sapiens
gaggattaatgataaatataaactttaaaacgattaaaaa

SEQ ID NO: 68665 - DNA, 40 bp, Homo sapiens
tttttaatcgttttaaagtttatatttatcattaatcctc

SEQ ID NO: 68666 - DNA, 40 bp, Homo sapiens
aggattaatgataaatataaactttaaaacgattaaaaaa

SEQ ID NO: 68667 - DNA, 40 bp, Homo sapiens
ttttttaatcgttttaaagtttatatttatcattaatcct

SEQ ID NO: 68668 - DNA, 40 bp, Homo sapiens
ggattaatgataaatataaactttaaaacgattaaaaaaa

SEQ ID NO: 68669 - DNA, 40 bp, Homo sapiens
tttttttaatcgttttaaagtttatatttatcattaatcc

SEQ ID NO: 68670 - DNA, 40 bp, Homo sapiens
gattaatgataaatataaactttaaaacgattaaaaaaat

SEQ ID NO: 68671 - DNA, 40 bp, Homo sapiens
atttttttaatcgttttaaagtttatatttatcattaatc

SEQ ID NO: 68672 - DNA, 40 bp, Homo sapiens
attaatgataaatataaactttaaaacgattaaaaaaatt

SEQ ID NO: 68673 - DNA, 40 bp, Homo sapiens
aatttttttaatcgttttaaagtttatatttatcattaat

SEQ ID NO: 68674 - DNA, 40 bp, Homo sapiens
ttaatgataaatataaactttaaaacgattaaaaaaattt

SEQ ID NO: 68675 - DNA, 40 bp, Homo sapiens
aaatttttttaatcgttttaaagtttatatttatcattaa

SEQ ID NO: 68676 - DNA, 40 bp, Homo sapiens
taatgataaatataaactttaaaacgattaaaaaaatttt

SEQ ID NO: 68677 - DNA, 40 bp, Homo sapiens
aaaatttttttaatcgttttaaagtttatatttatcatta

SEQ ID NO: 68678 - DNA, 40 bp, Homo sapiens
aatgataaatataaactttaaaacgattaaaaaaattttt

SEQ ID NO: 68679 - DNA, 40 bp, Homo sapiens
aaaaatttttttaatcgttttaaagtttatatttatcatt

SEQ ID NO: 68680 - DNA, 40 bp, Homo sapiens
atgataaatataaactttaaaacgattaaaaaaatttttt

SEQ ID NO: 68681 - DNA, 40 bp, Homo sapiens
aaaaaatttttttaatcgttttaaagtttatatttatcat

SEQ ID NO: 68682 - DNA, 40 bp, Homo sapiens
tgataaatataaactttaaaacgattaaaaaaattttttt

SEQ ID NO: 68683 - DNA, 40 bp, Homo sapiens
aaaaaaatttttttaatcgttttaaagtttatatttatca

SEQ ID NO: 68684 - DNA, 40 bp, Homo sapiens
gataaatataaactttaaaacgattaaaaaaattttttta

SEQ ID NO: 68685 - DNA, 40 bp, Homo sapiens
taaaaaaatttttttaatcgttttaaagtttatatttatc

SEQ ID NO: 68686 - DNA, 40 bp, Homo sapiens
ataaatataaactttaaaacgattaaaaaaatttttttag

SEQ ID NO: 68687 - DNA, 40 bp, Homo sapiens
ctaaaaaaatttttttaatcgttttaaagtttatatttat

SEQ ID NO: 68688 - DNA, 40 bp, Homo sapiens
taaatataaactttaaaacgattaaaaaaatttttttaga

SEQ ID NO: 68689 - DNA, 40 bp, Homo sapiens
tctaaaaaaatttttttaatcgttttaaagtttatattta

SEQ ID NO: 68690 - DNA, 40 bp, Homo sapiens
aaatataaactttaaaacgattaaaaaaatttttttagag

SEQ ID NO: 68691 - DNA, 40 bp, Homo sapiens
ctctaaaaaaatttttttaatcgttttaaagtttatattt

SEQ ID NO: 68692 - DNA, 40 bp, Homo sapiens
aatataaactttaaaacgattaaaaaaatttttttagaga

SEQ ID NO: 68693 - DNA, 40 bp, Homo sapiens
tctctaaaaaaatttttttaatcgttttaaagtttatatt

SEQ ID NO: 68694 - DNA, 40 bp, Homo sapiens
atataaactttaaaacgattaaaaaaatttttttagagac

SEQ ID NO: 68695 - DNA, 40 bp, Homo sapiens
gtctctaaaaaaatttttttaatcgttttaaagtttatat

SEQ ID NO: 68696 - DNA, 40 bp, Homo sapiens
tataaactttaaaacgattaaaaaaatttttttagagaca

SEQ ID NO: 68697 - DNA, 40 bp, Homo sapiens
tgtctctaaaaaaatttttttaatcgttttaaagtttata

SEQ ID NO: 68698 - DNA, 40 bp, Homo sapiens
ataaactttaaaacgattaaaaaaatttttttagagacag

SEQ ID NO: 68699 - DNA, 40 bp, Homo sapiens
ctgtctctaaaaaaatttttttaatcgttttaaagtttat

SEQ ID NO: 68700 - DNA, 40 bp, Homo sapiens
taaactttaaaacgattaaaaaaatttttttagagacagg

SEQ ID NO: 68701 - DNA, 40 bp, Homo sapiens
cctgtctctaaaaaaatttttttaatcgttttaaagttta

SEQ ID NO: 68702 - DNA, 40 bp, Homo sapiens
aaactttaaaacgattaaaaaaatttttttagagacaggg

SEQ ID NO: 68703 - DNA, 40 bp, Homo sapiens
ccctgtctctaaaaaaatttttttaatcgttttaaagttt

SEQ ID NO: 68704 - DNA, 40 bp, Homo sapiens
aactttaaaacgattaaaaaaatttttttagagacagggt

SEQ ID NO: 68705 - DNA, 40 bp, Homo sapiens
accctgtctctaaaaaaatttttttaatcgttttaaagtt

SEQ ID NO: 68706 - DNA, 40 bp, Homo sapiens
actttaaaacgattaaaaaaatttttttagagacagggtc

SEQ ID NO: 68707 - DNA, 40 bp, Homo sapiens
gaccctgtctctaaaaaaatttttttaatcgttttaaagt

SEQ ID NO: 68708 - DNA, 40 bp, Homo sapiens
ctttaaaacgattaaaaaaatttttttagagacagggtct

SEQ ID NO: 68709 - DNA, 40 bp, Homo sapiens
agaccctgtctctaaaaaaatttttttaatcgttttaaag

SEQ ID NO: 68710 - DNA, 40 bp, Homo sapiens
tttaaaacgattaaaaaaatttttttagagacagggtctt

SEQ ID NO: 68711 - DNA, 40 bp, Homo sapiens
aagaccctgtctctaaaaaaatttttttaatcgttttaaa

SEQ ID NO: 68712 - DNA, 40 bp, Homo sapiens
ttaaaacgattaaaaaaatttttttagagacagggtcttg

SEQ ID NO: 68713 - DNA, 40 bp, Homo sapiens
caagaccctgtctctaaaaaaatttttttaatcgttttaa

SEQ ID NO: 68714 - DNA, 40 bp, Homo sapiens
taaaacgattaaaaaaatttttttagagacagggtcttgc

SEQ ID NO: 68715 - DNA, 40 bp, Homo sapiens
gcaagaccctgtctctaaaaaaatttttttaatcgtttta

SEQ ID NO: 68716 - DNA, 40 bp, Homo sapiens
aaaacgattaaaaaaatttttttagagacagggtcttgct

SEQ ID NO: 68717 - DNA, 40 bp, Homo sapiens
agcaagaccctgtctctaaaaaaatttttttaatcgtttt

SEQ ID NO: 68718 - DNA, 40 bp, Homo sapiens
aaacgattaaaaaaatttttttagagacagggtcttgctc

SEQ ID NO: 68719 - DNA, 40 bp, Homo sapiens
gagcaagaccctgtctctaaaaaaatttttttaatcgttt

SEQ ID NO: 68720 - DNA, 40 bp, Homo sapiens
aacgattaaaaaaatttttttagagacagggtcttgctct

SEQ ID NO: 68721 - DNA, 40 bp, Homo sapiens
agagcaagaccctgtctctaaaaaaatttttttaatcgtt

SEQ ID NO: 68722 - DNA, 40 bp, Homo sapiens
acgattaaaaaaatttttttagagacagggtcttgctctg

SEQ ID NO: 68723 - DNA, 40 bp, Homo sapiens
cagagcaagaccctgtctctaaaaaaatttttttaatcgt

SEQ ID NO: 68724 - DNA, 40 bp, Homo sapiens
cgattaaaaaaatttttttagagacagggtcttgctctgt

SEQ ID NO: 68725 - DNA, 40 bp, Homo sapiens
acagagcaagaccctgtctctaaaaaaatttttttaatcg

SEQ ID NO: 68726 - DNA, 40 bp, Homo sapiens
gattaaaaaaatttttttagagacagggtcttgctctgtt

SEQ ID NO: 68727 - DNA, 40 bp, Homo sapiens
aacagagcaagaccctgtctctaaaaaaatttttttaatc

SEQ ID NO: 68728 - DNA, 40 bp, Homo sapiens
attaaaaaaatttttttagagacagggtcttgctctgttg

SEQ ID NO: 68729 - DNA, 40 bp, Homo sapiens
caacagagcaagaccctgtctctaaaaaaatttttttaat

SEQ ID NO: 68730 - DNA, 40 bp, Homo sapiens
ttaaaaaaatttttttagagacagggtcttgctctgttgc

SEQ ID NO: 68731 - DNA, 40 bp, Homo sapiens
gcaacagagcaagaccctgtctctaaaaaaatttttttaa

SEQ ID NO: 68732 - DNA, 40 bp, Homo sapiens
taaaaaaatttttttagagacagggtcttgctctgttgcc

SEQ ID NO: 68733 - DNA, 40 bp, Homo sapiens
ggcaacagagcaagaccctgtctctaaaaaaattttttta

SEQ ID NO: 68734 - DNA, 40 bp, Homo sapiens
aaaaaaatttttttagagacagggtcttgctctgttgccc

SEQ ID NO: 68735 - DNA, 40 bp, Homo sapiens
gggcaacagagcaagaccctgtctctaaaaaaattttttt

SEQ ID NO: 68736 - DNA, 40 bp, Homo sapiens
aaaaaatttttttagagacagggtcttgctctgttgccca

SEQ ID NO: 68737 - DNA, 40 bp, Homo sapiens
tgggcaacagagcaagaccctgtctctaaaaaaatttttt

SEQ ID NO: 68738 - DNA, 40 bp, Homo sapiens
aaaaatttttttagagacagggtcttgctctgttgcccag

SEQ ID NO: 68739 - DNA, 40 bp, Homo sapiens
ctgggcaacagagcaagaccctgtctctaaaaaaattttt

SEQ ID NO: 68740 - DNA, 40 bp, Homo sapiens
aaaatttttttagagacagggtcttgctctgttgcccaga

SEQ ID NO: 68741 - DNA, 40 bp, Homo sapiens
tctgggcaacagagcaagaccctgtctctaaaaaaatttt

SEQ ID NO: 68742 - DNA, 40 bp, Homo sapiens
aaatttttttagagacagggtcttgctctgttgcccagac

SEQ ID NO: 68743 - DNA, 40 bp, Homo sapiens
gtctgggcaacagagcaagaccctgtctctaaaaaaattt

SEQ ID NO: 68744 - DNA, 40 bp, Homo sapiens
aatttttttagagacagggtcttgctctgttgcccagact

SEQ ID NO: 68745 - DNA, 40 bp, Homo sapiens
agtctgggcaacagagcaagaccctgtctctaaaaaaatt

SEQ ID NO: 68746 - DNA, 40 bp, Homo sapiens
atttttttagagacagggtcttgctctgttgcccagactg

SEQ ID NO: 68747 - DNA, 40 bp, Homo sapiens
cagtctgggcaacagagcaagaccctgtctctaaaaaaat

SEQ ID NO: 68748 - DNA, 40 bp, Homo sapiens
tttttttagagacagggtcttgctctgttgcccagactga

SEQ ID NO: 68749 - DNA, 40 bp, Homo sapiens
tcagtctgggcaacagagcaagaccctgtctctaaaaaaa

SEQ ID NO: 68750 - DNA, 40 bp, Homo sapiens
ttttttagagacagggtcttgctctgttgcccagactgaa

SEQ ID NO: 68751 - DNA, 40 bp, Homo sapiens
ttcagtctgggcaacagagcaagaccctgtctctaaaaaa

SEQ ID NO: 68752 - DNA, 40 bp, Homo sapiens
tttttagagacagggtcttgctctgttgcccagactgaag

SEQ ID NO: 68753 - DNA, 40 bp, Homo sapiens
cttcagtctgggcaacagagcaagaccctgtctctaaaaa

SEQ ID NO: 68754 - DNA, 40 bp, Homo sapiens
ttttagagacagggtcttgctctgttgcccagactgaagt

SEQ ID NO: 68755 - DNA, 40 bp, Homo sapiens
acttcagtctgggcaacagagcaagaccctgtctctaaaa

SEQ ID NO: 68756 - DNA, 40 bp, Homo sapiens
tttagagacagggtcttgctctgttgcccagactgaagtg

SEQ ID NO: 68757 - DNA, 40 bp, Homo sapiens
cacttcagtctgggcaacagagcaagaccctgtctctaaa

SEQ ID NO: 68758 - DNA, 40 bp, Homo sapiens
ttagagacagggtcttgctctgttgcccagactgaagtgc

SEQ ID NO: 68759 - DNA, 40 bp, Homo sapiens
gcacttcagtctgggcaacagagcaagaccctgtctctaa

SEQ ID NO: 68760 - DNA, 40 bp, Homo sapiens
tagagacagggtcttgctctgttgcccagactgaagtgca

SEQ ID NO: 68761 - DNA, 40 bp, Homo sapiens
tgcacttcagtctgggcaacagagcaagaccctgtctcta

SEQ ID NO: 68762 - DNA, 40 bp, Homo sapiens
agagacagggtcttgctctgttgcccagactgaagtgcag

SEQ ID NO: 68763 - DNA, 40 bp, Homo sapiens
ctgcacttcagtctgggcaacagagcaagaccctgtctct

SEQ ID NO: 68764 - DNA, 40 bp, Homo sapiens
gagacagggtcttgctctgttgcccagactgaagtgcagt

SEQ ID NO: 68765 - DNA, 40 bp, Homo sapiens
actgcacttcagtctgggcaacagagcaagaccctgtctc

SEQ ID NO: 68766 - DNA, 40 bp, Homo sapiens
agacagggtcttgctctgttgcccagactgaagtgcagtg

SEQ ID NO: 68767 - DNA, 40 bp, Homo sapiens
cactgcacttcagtctgggcaacagagcaagaccctgtct

SEQ ID NO: 68768 - DNA, 40 bp, Homo sapiens
gacagggtcttgctctgttgcccagactgaagtgcagtgg

SEQ ID NO: 68769 - DNA, 40 bp, Homo sapiens
ccactgcacttcagtctgggcaacagagcaagaccctgtc

SEQ ID NO: 68770 - DNA, 40 bp, Homo sapiens
acagggtcttgctctgttgcccagactgaagtgcagtggt

SEQ ID NO: 68771 - DNA, 40 bp, Homo sapiens
accactgcacttcagtctgggcaacagagcaagaccctgt

SEQ ID NO: 68772 - DNA, 40 bp, Homo sapiens
cagggtcttgctctgttgcccagactgaagtgcagtggtg

SEQ ID NO: 68773 - DNA, 40 bp, Homo sapiens
caccactgcacttcagtctgggcaacagagcaagaccctg

SEQ ID NO: 68774 - DNA, 40 bp, Homo sapiens
agggtcttgctctgttgcccagactgaagtgcagtggtgc

SEQ ID NO: 68775 - DNA, 40 bp, Homo sapiens
gcaccactgcacttcagtctgggcaacagagcaagaccct

SEQ ID NO: 68776 - DNA, 40 bp, Homo sapiens
gggtcttgctctgttgcccagactgaagtgcagtggtgca

SEQ ID NO: 68777 - DNA, 40 bp, Homo sapiens
tgcaccactgcacttcagtctgggcaacagagcaagaccc

SEQ ID NO: 68778 - DNA, 40 bp, Homo sapiens
ggtcttgctctgttgcccagactgaagtgcagtggtgcag

SEQ ID NO: 68779 - DNA, 40 bp, Homo sapiens
ctgcaccactgcacttcagtctgggcaacagagcaagacc

SEQ ID NO: 68780 - DNA, 40 bp, Homo sapiens
gtcttgctctgttgcccagactgaagtgcagtggtgcagt

SEQ ID NO: 68781 - DNA, 40 bp, Homo sapiens
actgcaccactgcacttcagtctgggcaacagagcaagac

SEQ ID NO: 68782 - DNA, 40 bp, Homo sapiens
tcttgctctgttgcccagactgaagtgcagtggtgcagtc

SEQ ID NO: 68783 - DNA, 40 bp, Homo sapiens
gactgcaccactgcacttcagtctgggcaacagagcaaga

SEQ ID NO: 68784 - DNA, 40 bp, Homo sapiens
cttgctctgttgcccagactgaagtgcagtggtgcagtca

SEQ ID NO: 68785 - DNA, 40 bp, Homo sapiens
tgactgcaccactgcacttcagtctgggcaacagagcaag

SEQ ID NO: 68786 - DNA, 40 bp, Homo sapiens
ttgctctgttgcccagactgaagtgcagtggtgcagtcat

SEQ ID NO: 68787 - DNA, 40 bp, Homo sapiens
atgactgcaccactgcacttcagtctgggcaacagagcaa

SEQ ID NO: 68788 - DNA, 40 bp, Homo sapiens
tgctctgttgcccagactgaagtgcagtggtgcagtcata

SEQ ID NO: 68789 - DNA, 40 bp, Homo sapiens
tatgactgcaccactgcacttcagtctgggcaacagagca

SEQ ID NO: 68790 - DNA, 40 bp, Homo sapiens
gctctgttgcccagactgaagtgcagtggtgcagtcatag

SEQ ID NO: 68791 - DNA, 40 bp, Homo sapiens
ctatgactgcaccactgcacttcagtctgggcaacagagc

SEQ ID NO: 68792 - DNA, 40 bp, Homo sapiens
ctctgttgcccagactgaagtgcagtggtgcagtcatagc

SEQ ID NO: 68793 - DNA, 40 bp, Homo sapiens
gctatgactgcaccactgcacttcagtctgggcaacagag

SEQ ID NO: 68794 - DNA, 40 bp, Homo sapiens
tctgttgcccagactgaagtgcagtggtgcagtcatagct

SEQ ID NO: 68795 - DNA, 40 bp, Homo sapiens
agctatgactgcaccactgcacttcagtctgggcaacaga

SEQ ID NO: 68796 - DNA, 40 bp, Homo sapiens
ctgttgcccagactgaagtgcagtggtgcagtcatagctc

SEQ ID NO: 68797 - DNA, 40 bp, Homo sapiens
gagctatgactgcaccactgcacttcagtctgggcaacag

SEQ ID NO: 68798 - DNA, 40 bp, Homo sapiens
tgttgcccagactgaagtgcagtggtgcagtcatagctca

SEQ ID NO: 68799 - DNA, 40 bp, Homo sapiens
tgagctatgactgcaccactgcacttcagtctgggcaaca

SEQ ID NO: 68800 - DNA, 40 bp, Homo sapiens
gttgcccagactgaagtgcagtggtgcagtcatagctcaa

SEQ ID NO: 68801 - DNA, 40 bp, Homo sapiens
ttgagctatgactgcaccactgcacttcagtctgggcaac

SEQ ID NO: 68802 - DNA, 40 bp, Homo sapiens
ttgcccagactgaagtgcagtggtgcagtcatagctcaat

SEQ ID NO: 68803 - DNA, 40 bp, Homo sapiens
attgagctatgactgcaccactgcacttcagtctgggcaa

SEQ ID NO: 68804 - DNA, 40 bp, Homo sapiens
tgcccagactgaagtgcagtggtgcagtcatagctcaatg

SEQ ID NO: 68805 - DNA, 40 bp, Homo sapiens
cattgagctatgactgcaccactgcacttcagtctgggca

SEQ ID NO: 68806 - DNA, 40 bp, Homo sapiens
gcccagactgaagtgcagtggtgcagtcatagctcaatga

SEQ ID NO: 68807 - DNA, 40 bp, Homo sapiens
tcattgagctatgactgcaccactgcacttcagtctgggc

SEQ ID NO: 68808 - DNA, 40 bp, Homo sapiens
cccagactgaagtgcagtggtgcagtcatagctcaatgaa

SEQ ID NO: 68809 - DNA, 40 bp, Homo sapiens
ttcattgagctatgactgcaccactgcacttcagtctggg

SEQ ID NO: 68810 - DNA, 40 bp, Homo sapiens
ccagactgaagtgcagtggtgcagtcatagctcaatgaag

SEQ ID NO: 68811 - DNA, 40 bp, Homo sapiens
cttcattgagctatgactgcaccactgcacttcagtctgg

SEQ ID NO: 68812 - DNA, 40 bp, Homo sapiens
cagactgaagtgcagtggtgcagtcatagctcaatgaagc

SEQ ID NO: 68813 - DNA, 40 bp, Homo sapiens
gcttcattgagctatgactgcaccactgcacttcagtctg

SEQ ID NO: 68814 - DNA, 40 bp, Homo sapiens
agactgaagtgcagtggtgcagtcatagctcaatgaagcc

SEQ ID NO: 68815 - DNA, 40 bp, Homo sapiens
ggcttcattgagctatgactgcaccactgcacttcagtct

SEQ ID NO: 68816 - DNA, 40 bp, Homo sapiens
gactgaagtgcagtggtgcagtcatagctcaatgaagcct

SEQ ID NO: 68817 - DNA, 40 bp, Homo sapiens
aggcttcattgagctatgactgcaccactgcacttcagtc

SEQ ID NO: 68818 - DNA, 40 bp, Homo sapiens
actgaagtgcagtggtgcagtcatagctcaatgaagcctc

SEQ ID NO: 68819 - DNA, 40 bp, Homo sapiens
gaggcttcattgagctatgactgcaccactgcacttcagt

SEQ ID NO: 68820 - DNA, 40 bp, Homo sapiens
ctgaagtgcagtggtgcagtcatagctcaatgaagcctca

SEQ ID NO: 68821 - DNA, 40 bp, Homo sapiens
tgaggcttcattgagctatgactgcaccactgcacttcag

SEQ ID NO: 68822 - DNA, 40 bp, Homo sapiens
tgaagtgcagtggtgcagtcatagctcaatgaagcctcaa

SEQ ID NO: 68823 - DNA, 40 bp, Homo sapiens
ttgaggcttcattgagctatgactgcaccactgcacttca

SEQ ID NO: 68824 - DNA, 40 bp, Homo sapiens
gaagtgcagtggtgcagtcatagctcaatgaagcctcaaa

SEQ ID NO: 68825 - DNA, 40 bp, Homo sapiens
tttgaggcttcattgagctatgactgcaccactgcacttc

SEQ ID NO: 68826 - DNA, 40 bp, Homo sapiens
aagtgcagtggtgcagtcatagctcaatgaagcctcaaac

SEQ ID NO: 68827 - DNA, 40 bp, Homo sapiens
gtttgaggcttcattgagctatgactgcaccactgcactt

SEQ ID NO: 68828 - DNA, 40 bp, Homo sapiens
agtgcagtggtgcagtcatagctcaatgaagcctcaaact

SEQ ID NO: 68829 - DNA, 40 bp, Homo sapiens
agtttgaggcttcattgagctatgactgcaccactgcact

SEQ ID NO: 68830 - DNA, 40 bp, Homo sapiens
gtgcagtggtgcagtcatagctcaatgaagcctcaaactc

SEQ ID NO: 68831 - DNA, 40 bp, Homo sapiens
gagtttgaggcttcattgagctatgactgcaccactgcac

SEQ ID NO: 68832 - DNA, 40 bp, Homo sapiens
tgcagtggtgcagtcatagctcaatgaagcctcaaactcc

SEQ ID NO: 68833 - DNA, 40 bp, Homo sapiens
ggagtttgaggcttcattgagctatgactgcaccactgca

SEQ ID NO: 68834 - DNA, 40 bp, Homo sapiens
gcagtggtgcagtcatagctcaatgaagcctcaaactcct

SEQ ID NO: 68835 - DNA, 40 bp, Homo sapiens
aggagtttgaggcttcattgagctatgactgcaccactgc

SEQ ID NO: 68836 - DNA, 40 bp, Homo sapiens
cagtggtgcagtcatagctcaatgaagcctcaaactcctg

SEQ ID NO: 68837 - DNA, 40 bp, Homo sapiens
caggagtttgaggcttcattgagctatgactgcaccactg

SEQ ID NO: 68838 - DNA, 40 bp, Homo sapiens
agtggtgcagtcatagctcaatgaagcctcaaactcctgg

SEQ ID NO: 68839 - DNA, 40 bp, Homo sapiens
ccaggagtttgaggcttcattgagctatgactgcaccact

SEQ ID NO: 68840 - DNA, 40 bp, Homo sapiens
gtggtgcagtcatagctcaatgaagcctcaaactcctggg

SEQ ID NO: 68841 - DNA, 40 bp, Homo sapiens
cccaggagtttgaggcttcattgagctatgactgcaccac

SEQ ID NO: 68842 - DNA, 40 bp, Homo sapiens
tggtgcagtcatagctcaatgaagcctcaaactcctgggc

SEQ ID NO: 68843 - DNA, 40 bp, Homo sapiens
gcccaggagtttgaggcttcattgagctatgactgcacca

SEQ ID NO: 68844 - DNA, 40 bp, Homo sapiens
ggtgcagtcatagctcaatgaagcctcaaactcctgggcc

SEQ ID NO: 68845 - DNA, 40 bp, Homo sapiens
ggcccaggagtttgaggcttcattgagctatgactgcacc

SEQ ID NO: 68846 - DNA, 40 bp, Homo sapiens
gtgcagtcatagctcaatgaagcctcaaactcctgggccc

SEQ ID NO: 68847 - DNA, 40 bp, Homo sapiens
gggcccaggagtttgaggcttcattgagctatgactgcac

SEQ ID NO: 68848 - DNA, 40 bp, Homo sapiens
tgcagtcatagctcaatgaagcctcaaactcctgggccca

SEQ ID NO: 68849 - DNA, 40 bp, Homo sapiens
tgggcccaggagtttgaggcttcattgagctatgactgca

SEQ ID NO: 68850 - DNA, 40 bp, Homo sapiens
gcagtcatagctcaatgaagcctcaaactcctgggcccag

SEQ ID NO: 68851 - DNA, 40 bp, Homo sapiens
ctgggcccaggagtttgaggcttcattgagctatgactgc

SEQ ID NO: 68852 - DNA, 40 bp, Homo sapiens
cagtcatagctcaatgaagcctcaaactcctgggcccagg

SEQ ID NO: 68853 - DNA, 40 bp, Homo sapiens
cctgggcccaggagtttgaggcttcattgagctatgactg

SEQ ID NO: 68854 - DNA, 40 bp, Homo sapiens
agtcatagctcaatgaagcctcaaactcctgggcccaggc

SEQ ID NO: 68855 - DNA, 40 bp, Homo sapiens
gcctgggcccaggagtttgaggcttcattgagctatgact

SEQ ID NO: 68856 - DNA, 40 bp, Homo sapiens
gtcatagctcaatgaagcctcaaactcctgggcccaggca

SEQ ID NO: 68857 - DNA, 40 bp, Homo sapiens
tgcctgggcccaggagtttgaggcttcattgagctatgac

SEQ ID NO: 68858 - DNA, 40 bp, Homo sapiens
tcatagctcaatgaagcctcaaactcctgggcccaggcaa

SEQ ID NO: 68859 - DNA, 40 bp, Homo sapiens
ttgcctgggcccaggagtttgaggcttcattgagctatga

SEQ ID NO: 68860 - DNA, 40 bp, Homo sapiens
catagctcaatgaagcctcaaactcctgggcccaggcaac

SEQ ID NO: 68861 - DNA, 40 bp, Homo sapiens
gttgcctgggcccaggagtttgaggcttcattgagctatg

SEQ ID NO: 68862 - DNA, 40 bp, Homo sapiens
atagctcaatgaagcctcaaactcctgggcccaggcaacc

SEQ ID NO: 68863 - DNA, 40 bp, Homo sapiens
ggttgcctgggcccaggagtttgaggcttcattgagctat

SEQ ID NO: 68864 - DNA, 40 bp, Homo sapiens
tagctcaatgaagcctcaaactcctgggcccaggcaaccc

SEQ ID NO: 68865 - DNA, 40 bp, Homo sapiens
gggttgcctgggcccaggagtttgaggcttcattgagcta

SEQ ID NO: 68866 - DNA, 40 bp, Homo sapiens
agctcaatgaagcctcaaactcctgggcccaggcaaccct

SEQ ID NO: 68867 - DNA, 40 bp, Homo sapiens
agggttgcctgggcccaggagtttgaggcttcattgagct

SEQ ID NO: 68868 - DNA, 40 bp, Homo sapiens
gctcaatgaagcctcaaactcctgggcccaggcaaccctc

SEQ ID NO: 68869 - DNA, 40 bp, Homo sapiens
gagggttgcctgggcccaggagtttgaggcttcattgagc

SEQ ID NO: 68870 - DNA, 40 bp, Homo sapiens
ctcaatgaagcctcaaactcctgggcccaggcaaccctcc

SEQ ID NO: 68871 - DNA, 40 bp, Homo sapiens
ggagggttgcctgggcccaggagtttgaggcttcattgag

SEQ ID NO: 68872 - DNA, 40 bp, Homo sapiens
tcaatgaagcctcaaactcctgggcccaggcaaccctcct

SEQ ID NO: 68873 - DNA, 40 bp, Homo sapiens
aggagggttgcctgggcccaggagtttgaggcttcattga

SEQ ID NO: 68874 - DNA, 40 bp, Homo sapiens
caatgaagcctcaaactcctgggcccaggcaaccctcctg

SEQ ID NO: 68875 - DNA, 40 bp, Homo sapiens
caggagggttgcctgggcccaggagtttgaggcttcattg

SEQ ID NO: 68876 - DNA, 40 bp, Homo sapiens
aatgaagcctcaaactcctgggcccaggcaaccctcctgc

SEQ ID NO: 68877 - DNA, 40 bp, Homo sapiens
gcaggagggttgcctgggcccaggagtttgaggcttcatt

SEQ ID NO: 68878 - DNA, 40 bp, Homo sapiens
atgaagcctcaaactcctgggcccaggcaaccctcctgcc

SEQ ID NO: 68879 - DNA, 40 bp, Homo sapiens
ggcaggagggttgcctgggcccaggagtttgaggcttcat

SEQ ID NO: 68880 - DNA, 40 bp, Homo sapiens
tgaagcctcaaactcctgggcccaggcaaccctcctgcct

SEQ ID NO: 68881 - DNA, 40 bp, Homo sapiens
aggcaggagggttgcctgggcccaggagtttgaggcttca

SEQ ID NO: 68882 - DNA, 40 bp, Homo sapiens
gaagcctcaaactcctgggcccaggcaaccctcctgcctc

SEQ ID NO: 68883 - DNA, 40 bp, Homo sapiens
gaggcaggagggttgcctgggcccaggagtttgaggcttc

SEQ ID NO: 68884 - DNA, 40 bp, Homo sapiens
aagcctcaaactcctgggcccaggcaaccctcctgcctca

SEQ ID NO: 68885 - DNA, 40 bp, Homo sapiens
tgaggcaggagggttgcctgggcccaggagtttgaggctt

SEQ ID NO: 68886 - DNA, 40 bp, Homo sapiens
agcctcaaactcctgggcccaggcaaccctcctgcctcag

SEQ ID NO: 68887 - DNA, 40 bp, Homo sapiens
ctgaggcaggagggttgcctgggcccaggagtttgaggct

SEQ ID NO: 68888 - DNA, 40 bp, Homo sapiens
gcctcaaactcctgggcccaggcaaccctcctgcctcagc

SEQ ID NO: 68889 - DNA, 40 bp, Homo sapiens
gctgaggcaggagggttgcctgggcccaggagtttgaggc

SEQ ID NO: 68890 - DNA, 40 bp, Homo sapiens
cctcaaactcctgggcccaggcaaccctcctgcctcagcc

SEQ ID NO: 68891 - DNA, 40 bp, Homo sapiens
ggctgaggcaggagggttgcctgggcccaggagtttgagg

SEQ ID NO: 68892 - DNA, 40 bp, Homo sapiens
ctcaaactcctgggcccaggcaaccctcctgcctcagcct

SEQ ID NO: 68893 - DNA, 40 bp, Homo sapiens
aggctgaggcaggagggttgcctgggcccaggagtttgag

SEQ ID NO: 68894 - DNA, 40 bp, Homo sapiens
tcaaactcctgggcccaggcaaccctcctgcctcagcctt

SEQ ID NO: 68895 - DNA, 40 bp, Homo sapiens
aaggctgaggcaggagggttgcctgggcccaggagtttga

SEQ ID NO: 68896 - DNA, 40 bp, Homo sapiens
caaactcctgggcccaggcaaccctcctgcctcagccttt

SEQ ID NO: 68897 - DNA, 40 bp, Homo sapiens
aaaggctgaggcaggagggttgcctgggcccaggagtttg

SEQ ID NO: 68898 - DNA, 40 bp, Homo sapiens
aaactcctgggcccaggcaaccctcctgcctcagcctttt

SEQ ID NO: 68899 - DNA, 40 bp, Homo sapiens
aaaaggctgaggcaggagggttgcctgggcccaggagttt

SEQ ID NO: 68900 - DNA, 40 bp, Homo sapiens
aactcctgggcccaggcaaccctcctgcctcagccttttg

SEQ ID NO: 68901 - DNA, 40 bp, Homo sapiens
caaaaggctgaggcaggagggttgcctgggcccaggagtt

SEQ ID NO: 68902 - DNA, 40 bp, Homo sapiens
actcctgggcccaggcaaccctcctgcctcagccttttga

SEQ ID NO: 68903 - DNA, 40 bp, Homo sapiens
tcaaaaggctgaggcaggagggttgcctgggcccaggagt

SEQ ID NO: 68904 - DNA, 40 bp, Homo sapiens
ctcctgggcccaggcaaccctcctgcctcagccttttgag

SEQ ID NO: 68905 - DNA, 40 bp, Homo sapiens
ctcaaaaggctgaggcaggagggttgcctgggcccaggag

SEQ ID NO: 68906 - DNA, 40 bp, Homo sapiens
tcctgggcccaggcaaccctcctgcctcagccttttgagt

SEQ ID NO: 68907 - DNA, 40 bp, Homo sapiens
actcaaaaggctgaggcaggagggttgcctgggcccagga

SEQ ID NO: 68908 - DNA, 40 bp, Homo sapiens
cctgggcccaggcaaccctcctgcctcagccttttgagta

SEQ ID NO: 68909 - DNA, 40 bp, Homo sapiens
tactcaaaaggctgaggcaggagggttgcctgggcccagg

SEQ ID NO: 68910 - DNA, 40 bp, Homo sapiens
ctgggcccaggcaaccctcctgcctcagccttttgagtag

SEQ ID NO: 68911 - DNA, 40 bp, Homo sapiens
ctactcaaaaggctgaggcaggagggttgcctgggcccag

SEQ ID NO: 68912 - DNA, 40 bp, Homo sapiens
tgggcccaggcaaccctcctgcctcagccttttgagtagc

SEQ ID NO: 68913 - DNA, 40 bp, Homo sapiens
gctactcaaaaggctgaggcaggagggttgcctgggccca

SEQ ID NO: 68914 - DNA, 40 bp, Homo sapiens
gggcccaggcaaccctcctgcctcagccttttgagtagct

SEQ ID NO: 68915 - DNA, 40 bp, Homo sapiens
agctactcaaaaggctgaggcaggagggttgcctgggccc

SEQ ID NO: 68916 - DNA, 40 bp, Homo sapiens
ggcccaggcaaccctcctgcctcagccttttgagtagctg

SEQ ID NO: 68917 - DNA, 40 bp, Homo sapiens
cagctactcaaaaggctgaggcaggagggttgcctgggcc

SEQ ID NO: 68918 - DNA, 40 bp, Homo sapiens
gcccaggcaaccctcctgcctcagccttttgagtagctgg

SEQ ID NO: 68919 - DNA, 40 bp, Homo sapiens
ccagctactcaaaaggctgaggcaggagggttgcctgggc

SEQ ID NO: 68920 - DNA, 40 bp, Homo sapiens
cccaggcaaccctcctgcctcagccttttgagtagctggg

SEQ ID NO: 68921 - DNA, 40 bp, Homo sapiens
cccagctactcaaaaggctgaggcaggagggttgcctggg

SEQ ID NO: 68922 - DNA, 40 bp, Homo sapiens
ccaggcaaccctcctgcctcagccttttgagtagctggga

SEQ ID NO: 68923 - DNA, 40 bp, Homo sapiens
tcccagctactcaaaaggctgaggcaggagggttgcctgg

SEQ ID NO: 68924 - DNA, 40 bp, Homo sapiens
caggcaaccctcctgcctcagccttttgagtagctgggac

SEQ ID NO: 68925 - DNA, 40 bp, Homo sapiens
gtcccagctactcaaaaggctgaggcaggagggttgcctg

SEQ ID NO: 68926 - DNA, 40 bp, Homo sapiens
aggcaaccctcctgcctcagccttttgagtagctgggact

SEQ ID NO: 68927 - DNA, 40 bp, Homo sapiens
agtcccagctactcaaaaggctgaggcaggagggttgcct

SEQ ID NO: 68928 - DNA, 40 bp, Homo sapiens
ggcaaccctcctgcctcagccttttgagtagctgggactt

SEQ ID NO: 68929 - DNA, 40 bp, Homo sapiens
aagtcccagctactcaaaaggctgaggcaggagggttgcc

SEQ ID NO: 68930 - DNA, 40 bp, Homo sapiens
gcaaccctcctgcctcagccttttgagtagctgggacttc

SEQ ID NO: 68931 - DNA, 40 bp, Homo sapiens
gaagtcccagctactcaaaaggctgaggcaggagggttgc

SEQ ID NO: 68932 - DNA, 40 bp, Homo sapiens
caaccctcctgcctcagccttttgagtagctgggacttca

SEQ ID NO: 68933 - DNA, 40 bp, Homo sapiens
tgaagtcccagctactcaaaaggctgaggcaggagggttg

SEQ ID NO: 68934 - DNA, 40 bp, Homo sapiens
aaccctcctgcctcagccttttgagtagctgggacttcag

SEQ ID NO: 68935 - DNA, 40 bp, Homo sapiens
ctgaagtcccagctactcaaaaggctgaggcaggagggtt

SEQ ID NO: 68936 - DNA, 40 bp, Homo sapiens
accctcctgcctcagccttttgagtagctgggacttcagg

SEQ ID NO: 68937 - DNA, 40 bp, Homo sapiens
cctgaagtcccagctactcaaaaggctgaggcaggagggt

SEQ ID NO: 68938 - DNA, 40 bp, Homo sapiens
ccctcctgcctcagccttttgagtagctgggacttcaggc

SEQ ID NO: 68939 - DNA, 40 bp, Homo sapiens
gcctgaagtcccagctactcaaaaggctgaggcaggaggg

SEQ ID NO: 68940 - DNA, 40 bp, Homo sapiens
cctcctgcctcagccttttgagtagctgggacttcaggct

SEQ ID NO: 68941 - DNA, 40 bp, Homo sapiens
agcctgaagtcccagctactcaaaaggctgaggcaggagg

SEQ ID NO: 68942 - DNA, 40 bp, Homo sapiens
ctcctgcctcagccttttgagtagctgggacttcaggctc

SEQ ID NO: 68943 - DNA, 40 bp, Homo sapiens
gagcctgaagtcccagctactcaaaaggctgaggcaggag

SEQ ID NO: 68944 - DNA, 40 bp, Homo sapiens
tcctgcctcagccttttgagtagctgggacttcaggctca

SEQ ID NO: 68945 - DNA, 40 bp, Homo sapiens
tgagcctgaagtcccagctactcaaaaggctgaggcagga

SEQ ID NO: 68946 - DNA, 40 bp, Homo sapiens
cctgcctcagccttttgagtagctgggacttcaggctcat

SEQ ID NO: 68947 - DNA, 40 bp, Homo sapiens
atgagcctgaagtcccagctactcaaaaggctgaggcagg

SEQ ID NO: 68948 - DNA, 40 bp, Homo sapiens
ctgcctcagccttttgagtagctgggacttcaggctcatg

SEQ ID NO: 68949 - DNA, 40 bp, Homo sapiens
catgagcctgaagtcccagctactcaaaaggctgaggcag

SEQ ID NO: 68950 - DNA, 40 bp, Homo sapiens
tgcctcagccttttgagtagctgggacttcaggctcatgc

SEQ ID NO: 68951 - DNA, 40 bp, Homo sapiens
gcatgagcctgaagtcccagctactcaaaaggctgaggca

SEQ ID NO: 68952 - DNA, 40 bp, Homo sapiens
gcctcagccttttgagtagctgggacttcaggctcatgcc

SEQ ID NO: 68953 - DNA, 40 bp, Homo sapiens
ggcatgagcctgaagtcccagctactcaaaaggctgaggc

SEQ ID NO: 68954 - DNA, 40 bp, Homo sapiens
cctcagccttttgagtagctgggacttcaggctcatgcca

SEQ ID NO: 68955 - DNA, 40 bp, Homo sapiens
tggcatgagcctgaagtcccagctactcaaaaggctgagg

SEQ ID NO: 68956 - DNA, 40 bp, Homo sapiens
ctcagccttttgagtagctgggacttcaggctcatgccaa

SEQ ID NO: 68957 - DNA, 40 bp, Homo sapiens
ttggcatgagcctgaagtcccagctactcaaaaggctgag

SEQ ID NO: 68958 - DNA, 40 bp, Homo sapiens
tcagccttttgagtagctgggacttcaggctcatgccaac

SEQ ID NO: 68959 - DNA, 40 bp, Homo sapiens
gttggcatgagcctgaagtcccagctactcaaaaggctga

SEQ ID NO: 68960 - DNA, 40 bp, Homo sapiens
cagccttttgagtagctgggacttcaggctcatgccaaca

SEQ ID NO: 68961 - DNA, 40 bp, Homo sapiens
tgttggcatgagcctgaagtcccagctactcaaaaggctg

SEQ ID NO: 68962 - DNA, 40 bp, Homo sapiens
agccttttgagtagctgggacttcaggctcatgccaacat

SEQ ID NO: 68963 - DNA, 40 bp, Homo sapiens
atgttggcatgagcctgaagtcccagctactcaaaaggct

SEQ ID NO: 68964 - DNA, 40 bp, Homo sapiens
gccttttgagtagctgggacttcaggctcatgccaacatg

SEQ ID NO: 68965 - DNA, 40 bp, Homo sapiens
catgttggcatgagcctgaagtcccagctactcaaaaggc

SEQ ID NO: 68966 - DNA, 40 bp, Homo sapiens
ccttttgagtagctgggacttcaggctcatgccaacatgc

SEQ ID NO: 68967 - DNA, 40 bp, Homo sapiens
gcatgttggcatgagcctgaagtcccagctactcaaaagg

SEQ ID NO: 68968 - DNA, 40 bp, Homo sapiens
cttttgagtagctgggacttcaggctcatgccaacatgcc

SEQ ID NO: 68969 - DNA, 40 bp, Homo sapiens
ggcatgttggcatgagcctgaagtcccagctactcaaaag

SEQ ID NO: 68970 - DNA, 40 bp, Homo sapiens
ttttgagtagctgggacttcaggctcatgccaacatgcct

SEQ ID NO: 68971 - DNA, 40 bp, Homo sapiens
aggcatgttggcatgagcctgaagtcccagctactcaaaa

SEQ ID NO: 68972 - DNA, 40 bp, Homo sapiens
tttgagtagctgggacttcaggctcatgccaacatgccta

SEQ ID NO: 68973 - DNA, 40 bp, Homo sapiens
taggcatgttggcatgagcctgaagtcccagctactcaaa

SEQ ID NO: 68974 - DNA, 40 bp, Homo sapiens
ttgagtagctgggacttcaggctcatgccaacatgcctaa

SEQ ID NO: 68975 - DNA, 40 bp, Homo sapiens
ttaggcatgttggcatgagcctgaagtcccagctactcaa

SEQ ID NO: 68976 - DNA, 40 bp, Homo sapiens
tgagtagctgggacttcaggctcatgccaacatgcctaat

SEQ ID NO: 68977 - DNA, 40 bp, Homo sapiens
attaggcatgttggcatgagcctgaagtcccagctactca

SEQ ID NO: 68978 - DNA, 40 bp, Homo sapiens
gagtagctgggacttcaggctcatgccaacatgcctaatt

SEQ ID NO: 68979 - DNA, 40 bp, Homo sapiens
aattaggcatgttggcatgagcctgaagtcccagctactc

SEQ ID NO: 68980 - DNA, 40 bp, Homo sapiens
agtagctgggacttcaggctcatgccaacatgcctaattt

SEQ ID NO: 68981 - DNA, 40 bp, Homo sapiens
aaattaggcatgttggcatgagcctgaagtcccagctact

SEQ ID NO: 68982 - DNA, 40 bp, Homo sapiens
gtagctgggacttcaggctcatgccaacatgcctaattta

SEQ ID NO: 68983 - DNA, 40 bp, Homo sapiens
taaattaggcatgttggcatgagcctgaagtcccagctac

SEQ ID NO: 68984 - DNA, 40 bp, Homo sapiens
tagctgggacttcaggctcatgccaacatgcctaatttat

SEQ ID NO: 68985 - DNA, 40 bp, Homo sapiens
ataaattaggcatgttggcatgagcctgaagtcccagcta

SEQ ID NO: 68986 - DNA, 40 bp, Homo sapiens
agctgggacttcaggctcatgccaacatgcctaatttatc

SEQ ID NO: 68987 - DNA, 40 bp, Homo sapiens
gataaattaggcatgttggcatgagcctgaagtcccagct

SEQ ID NO: 68988 - DNA, 40 bp, Homo sapiens
gctgggacttcaggctcatgccaacatgcctaatttatct

SEQ ID NO: 68989 - DNA, 40 bp, Homo sapiens
agataaattaggcatgttggcatgagcctgaagtcccagc

SEQ ID NO: 68990 - DNA, 40 bp, Homo sapiens
ctgggacttcaggctcatgccaacatgcctaatttatctt

SEQ ID NO: 68991 - DNA, 40 bp, Homo sapiens
aagataaattaggcatgttggcatgagcctgaagtcccag

SEQ ID NO: 68992 - DNA, 40 bp, Homo sapiens
tgggacttcaggctcatgccaacatgcctaatttatctta

SEQ ID NO: 68993 - DNA, 40 bp, Homo sapiens
taagataaattaggcatgttggcatgagcctgaagtccca

SEQ ID NO: 68994 - DNA, 40 bp, Homo sapiens
gggacttcaggctcatgccaacatgcctaatttatcttat

SEQ ID NO: 68995 - DNA, 40 bp, Homo sapiens
ataagataaattaggcatgttggcatgagcctgaagtccc

SEQ ID NO: 68996 - DNA, 40 bp, Homo sapiens
ggacttcaggctcatgccaacatgcctaatttatcttatt

SEQ ID NO: 68997 - DNA, 40 bp, Homo sapiens
aataagataaattaggcatgttggcatgagcctgaagtcc

SEQ ID NO: 68998 - DNA, 40 bp, Homo sapiens
gacttcaggctcatgccaacatgcctaatttatcttattt

SEQ ID NO: 68999 - DNA, 40 bp, Homo sapiens
aaataagataaattaggcatgttggcatgagcctgaagtc

SEQ ID NO: 69000 - DNA, 40 bp, Homo sapiens
acttcaggctcatgccaacatgcctaatttatcttatttt

SEQ ID NO: 69001 - DNA, 40 bp, Homo sapiens
aaaataagataaattaggcatgttggcatgagcctgaagt

SEQ ID NO: 69002 - DNA, 40 bp, Homo sapiens
cttcaggctcatgccaacatgcctaatttatcttattttt

SEQ ID NO: 69003 - DNA, 40 bp, Homo sapiens
aaaaataagataaattaggcatgttggcatgagcctgaag

SEQ ID NO: 69004 - DNA, 40 bp, Homo sapiens
ttcaggctcatgccaacatgcctaatttatcttattttta

SEQ ID NO: 69005 - DNA, 40 bp, Homo sapiens
taaaaataagataaattaggcatgttggcatgagcctgaa

SEQ ID NO: 69006 - DNA, 40 bp, Homo sapiens
tcaggctcatgccaacatgcctaatttatcttatttttag

SEQ ID NO: 69007 - DNA, 40 bp, Homo sapiens
ctaaaaataagataaattaggcatgttggcatgagcctga

SEQ ID NO: 69008 - DNA, 40 bp, Homo sapiens
caggctcatgccaacatgcctaatttatcttatttttagt

SEQ ID NO: 69009 - DNA, 40 bp, Homo sapiens
actaaaaataagataaattaggcatgttggcatgagcctg

SEQ ID NO: 69010 - DNA, 40 bp, Homo sapiens
aggctcatgccaacatgcctaatttatcttatttttagta

SEQ ID NO: 69011 - DNA, 40 bp, Homo sapiens
tactaaaaataagataaattaggcatgttggcatgagcct

SEQ ID NO: 69012 - DNA, 40 bp, Homo sapiens
ggctcatgccaacatgcctaatttatcttatttttagtag

SEQ ID NO: 69013 - DNA, 40 bp, Homo sapiens
ctactaaaaataagataaattaggcatgttggcatgagcc

SEQ ID NO: 69014 - DNA, 40 bp, Homo sapiens
gctcatgccaacatgcctaatttatcttatttttagtaga

SEQ ID NO: 69015 - DNA, 40 bp, Homo sapiens
tctactaaaaataagataaattaggcatgttggcatgagc

SEQ ID NO: 69016 - DNA, 40 bp, Homo sapiens
ctcatgccaacatgcctaatttatcttatttttagtagag

SEQ ID NO: 69017 - DNA, 40 bp, Homo sapiens
ctctactaaaaataagataaattaggcatgttggcatgag

SEQ ID NO: 69018 - DNA, 40 bp, Homo sapiens
tcatgccaacatgcctaatttatcttatttttagtagaga

SEQ ID NO: 69019 - DNA, 40 bp, Homo sapiens
tctctactaaaaataagataaattaggcatgttggcatga

SEQ ID NO: 69020 - DNA, 40 bp, Homo sapiens
catgccaacatgcctaatttatcttatttttagtagagat

SEQ ID NO: 69021 - DNA, 40 bp, Homo sapiens
atctctactaaaaataagataaattaggcatgttggcatg

SEQ ID NO: 69022 - DNA, 40 bp, Homo sapiens
atgccaacatgcctaatttatcttatttttagtagagatg

SEQ ID NO: 69023 - DNA, 40 bp, Homo sapiens
catctctactaaaaataagataaattaggcatgttggcat

SEQ ID NO: 69024 - DNA, 40 bp, Homo sapiens
tgccaacatgcctaatttatcttatttttagtagagatga

SEQ ID NO: 69025 - DNA, 40 bp, Homo sapiens
tcatctctactaaaaataagataaattaggcatgttggca

SEQ ID NO: 69026 - DNA, 40 bp, Homo sapiens
gccaacatgcctaatttatcttatttttagtagagatgag

SEQ ID NO: 69027 - DNA, 40 bp, Homo sapiens
ctcatctctactaaaaataagataaattaggcatgttggc

SEQ ID NO: 69028 - DNA, 40 bp, Homo sapiens
ccaacatgcctaatttatcttatttttagtagagatgagg

SEQ ID NO: 69029 - DNA, 40 bp, Homo sapiens
cctcatctctactaaaaataagataaattaggcatgttgg

SEQ ID NO: 69030 - DNA, 40 bp, Homo sapiens
caacatgcctaatttatcttatttttagtagagatgaggt

SEQ ID NO: 69031 - DNA, 40 bp, Homo sapiens
acctcatctctactaaaaataagataaattaggcatgttg

SEQ ID NO: 69032 - DNA, 40 bp, Homo sapiens
aacatgcctaatttatcttatttttagtagagatgaggtc

SEQ ID NO: 69033 - DNA, 40 bp, Homo sapiens
gacctcatctctactaaaaataagataaattaggcatgtt

SEQ ID NO: 69034 - DNA, 40 bp, Homo sapiens
acatgcctaatttatcttatttttagtagagatgaggtct

SEQ ID NO: 69035 - DNA, 40 bp, Homo sapiens
agacctcatctctactaaaaataagataaattaggcatgt

SEQ ID NO: 69036 - DNA, 40 bp, Homo sapiens
catgcctaatttatcttatttttagtagagatgaggtctc

SEQ ID NO: 69037 - DNA, 40 bp, Homo sapiens
gagacctcatctctactaaaaataagataaattaggcatg

SEQ ID NO: 69038 - DNA, 40 bp, Homo sapiens
atgcctaatttatcttatttttagtagagatgaggtctca

SEQ ID NO: 69039 - DNA, 40 bp, Homo sapiens
tgagacctcatctctactaaaaataagataaattaggcat

SEQ ID NO: 69040 - DNA, 40 bp, Homo sapiens
tgcctaatttatcttatttttagtagagatgaggtctcaa

SEQ ID NO: 69041 - DNA, 40 bp, Homo sapiens
ttgagacctcatctctactaaaaataagataaattaggca

SEQ ID NO: 69042 - DNA, 40 bp, Homo sapiens
gcctaatttatcttatttttagtagagatgaggtctcaaa

SEQ ID NO: 69043 - DNA, 40 bp, Homo sapiens
tttgagacctcatctctactaaaaataagataaattaggc

SEQ ID NO: 69044 - DNA, 40 bp, Homo sapiens
cctaatttatcttatttttagtagagatgaggtctcaaac

SEQ ID NO: 69045 - DNA, 40 bp, Homo sapiens
gtttgagacctcatctctactaaaaataagataaattagg

SEQ ID NO: 69046 - DNA, 40 bp, Homo sapiens
ctaatttatcttatttttagtagagatgaggtctcaaact

SEQ ID NO: 69047 - DNA, 40 bp, Homo sapiens
agtttgagacctcatctctactaaaaataagataaattag

SEQ ID NO: 69048 - DNA, 40 bp, Homo sapiens
taatttatcttatttttagtagagatgaggtctcaaactc

SEQ ID NO: 69049 - DNA, 40 bp, Homo sapiens
gagtttgagacctcatctctactaaaaataagataaatta

SEQ ID NO: 69050 - DNA, 40 bp, Homo sapiens
aatttatcttatttttagtagagatgaggtctcaaactcc

SEQ ID NO: 69051 - DNA, 40 bp, Homo sapiens
ggagtttgagacctcatctctactaaaaataagataaatt

SEQ ID NO: 69052 - DNA, 40 bp, Homo sapiens
atttatcttatttttagtagagatgaggtctcaaactcct

SEQ ID NO: 69053 - DNA, 40 bp, Homo sapiens
aggagtttgagacctcatctctactaaaaataagataaat

SEQ ID NO: 69054 - DNA, 40 bp, Homo sapiens
tttatcttatttttagtagagatgaggtctcaaactcctg

SEQ ID NO: 69055 - DNA, 40 bp, Homo sapiens
caggagtttgagacctcatctctactaaaaataagataaa

SEQ ID NO: 69056 - DNA, 40 bp, Homo sapiens
ttatcttatttttagtagagatgaggtctcaaactcctgg

SEQ ID NO: 69057 - DNA, 40 bp, Homo sapiens
ccaggagtttgagacctcatctctactaaaaataagataa

SEQ ID NO: 69058 - DNA, 40 bp, Homo sapiens
tatcttatttttagtagagatgaggtctcaaactcctggc

SEQ ID NO: 69059 - DNA, 40 bp, Homo sapiens
gccaggagtttgagacctcatctctactaaaaataagata

SEQ ID NO: 69060 - DNA, 40 bp, Homo sapiens
atcttatttttagtagagatgaggtctcaaactcctggca

SEQ ID NO: 69061 - DNA, 40 bp, Homo sapiens
tgccaggagtttgagacctcatctctactaaaaataagat

SEQ ID NO: 69062 - DNA, 40 bp, Homo sapiens
tcttatttttagtagagatgaggtctcaaactcctggcat

SEQ ID NO: 69063 - DNA, 40 bp, Homo sapiens
atgccaggagtttgagacctcatctctactaaaaataaga

SEQ ID NO: 69064 - DNA, 40 bp, Homo sapiens
cttatttttagtagagatgaggtctcaaactcctggcatc

SEQ ID NO: 69065 - DNA, 40 bp, Homo sapiens
gatgccaggagtttgagacctcatctctactaaaaataag

SEQ ID NO: 69066 - DNA, 40 bp, Homo sapiens
ttatttttagtagagatgaggtctcaaactcctggcatct

SEQ ID NO: 69067 - DNA, 40 bp, Homo sapiens
agatgccaggagtttgagacctcatctctactaaaaataa

SEQ ID NO: 69068 - DNA, 40 bp, Homo sapiens
tatttttagtagagatgaggtctcaaactcctggcatctc

SEQ ID NO: 69069 - DNA, 40 bp, Homo sapiens
gagatgccaggagtttgagacctcatctctactaaaaata

SEQ ID NO: 69070 - DNA, 40 bp, Homo sapiens
atttttagtagagatgaggtctcaaactcctggcatctct

SEQ ID NO: 69071 - DNA, 40 bp, Homo sapiens
agagatgccaggagtttgagacctcatctctactaaaaat

SEQ ID NO: 69072 - DNA, 40 bp, Homo sapiens
tttttagtagagatgaggtctcaaactcctggcatctctt

SEQ ID NO: 69073 - DNA, 40 bp, Homo sapiens
aagagatgccaggagtttgagacctcatctctactaaaaa

SEQ ID NO: 69074 - DNA, 40 bp, Homo sapiens
ttttagtagagatgaggtctcaaactcctggcatctcttg

SEQ ID NO: 69075 - DNA, 40 bp, Homo sapiens
caagagatgccaggagtttgagacctcatctctactaaaa

SEQ ID NO: 69076 - DNA, 40 bp, Homo sapiens
tttagtagagatgaggtctcaaactcctggcatctcttgc

SEQ ID NO: 69077 - DNA, 40 bp, Homo sapiens
gcaagagatgccaggagtttgagacctcatctctactaaa

SEQ ID NO: 69078 - DNA, 40 bp, Homo sapiens
ttagtagagatgaggtctcaaactcctggcatctcttgcc

SEQ ID NO: 69079 - DNA, 40 bp, Homo sapiens
ggcaagagatgccaggagtttgagacctcatctctactaa

SEQ ID NO: 69080 - DNA, 40 bp, Homo sapiens
tagtagagatgaggtctcaaactcctggcatctcttgccc

SEQ ID NO: 69081 - DNA, 40 bp, Homo sapiens
gggcaagagatgccaggagtttgagacctcatctctacta

SEQ ID NO: 69082 - DNA, 40 bp, Homo sapiens
agtagagatgaggtctcaaactcctggcatctcttgccct

SEQ ID NO: 69083 - DNA, 40 bp, Homo sapiens
agggcaagagatgccaggagtttgagacctcatctctact

SEQ ID NO: 69084 - DNA, 40 bp, Homo sapiens
gtagagatgaggtctcaaactcctggcatctcttgccctc

SEQ ID NO: 69085 - DNA, 40 bp, Homo sapiens
gagggcaagagatgccaggagtttgagacctcatctctac

SEQ ID NO: 69086 - DNA, 40 bp, Homo sapiens
tagagatgaggtctcaaactcctggcatctcttgccctct

SEQ ID NO: 69087 - DNA, 40 bp, Homo sapiens
agagggcaagagatgccaggagtttgagacctcatctcta

SEQ ID NO: 69088 - DNA, 40 bp, Homo sapiens
agagatgaggtctcaaactcctggcatctcttgccctctc

SEQ ID NO: 69089 - DNA, 40 bp, Homo sapiens
gagagggcaagagatgccaggagtttgagacctcatctct

SEQ ID NO: 69090 - DNA, 40 bp, Homo sapiens
gagatgaggtctcaaactcctggcatctcttgccctctca

SEQ ID NO: 69091 - DNA, 40 bp, Homo sapiens
tgagagggcaagagatgccaggagtttgagacctcatctc

SEQ ID NO: 69092 - DNA, 40 bp, Homo sapiens
agatgaggtctcaaactcctggcatctcttgccctctcaa

SEQ ID NO: 69093 - DNA, 40 bp, Homo sapiens
ttgagagggcaagagatgccaggagtttgagacctcatct

SEQ ID NO: 69094 - DNA, 40 bp, Homo sapiens
gatgaggtctcaaactcctggcatctcttgccctctcaaa

SEQ ID NO: 69095 - DNA, 40 bp, Homo sapiens
tttgagagggcaagagatgccaggagtttgagacctcatc

SEQ ID NO: 69096 - DNA, 40 bp, Homo sapiens
atgaggtctcaaactcctggcatctcttgccctctcaaag

SEQ ID NO: 69097 - DNA, 40 bp, Homo sapiens
ctttgagagggcaagagatgccaggagtttgagacctcat

SEQ ID NO: 69098 - DNA, 40 bp, Homo sapiens
tgaggtctcaaactcctggcatctcttgccctctcaaagt

SEQ ID NO: 69099 - DNA, 40 bp, Homo sapiens
actttgagagggcaagagatgccaggagtttgagacctca

SEQ ID NO: 69100 - DNA, 40 bp, Homo sapiens
gaggtctcaaactcctggcatctcttgccctctcaaagtg

SEQ ID NO: 69101 - DNA, 40 bp, Homo sapiens
cactttgagagggcaagagatgccaggagtttgagacctc

SEQ ID NO: 69102 - DNA, 40 bp, Homo sapiens
aggtctcaaactcctggcatctcttgccctctcaaagtgc

SEQ ID NO: 69103 - DNA, 40 bp, Homo sapiens
gcactttgagagggcaagagatgccaggagtttgagacct

SEQ ID NO: 69104 - DNA, 40 bp, Homo sapiens
ggtctcaaactcctggcatctcttgccctctcaaagtgct

SEQ ID NO: 69105 - DNA, 40 bp, Homo sapiens
agcactttgagagggcaagagatgccaggagtttgagacc

SEQ ID NO: 69106 - DNA, 40 bp, Homo sapiens
gtctcaaactcctggcatctcttgccctctcaaagtgctg

SEQ ID NO: 69107 - DNA, 40 bp, Homo sapiens
cagcactttgagagggcaagagatgccaggagtttgagac

SEQ ID NO: 69108 - DNA, 40 bp, Homo sapiens
tctcaaactcctggcatctcttgccctctcaaagtgctgg

SEQ ID NO: 69109 - DNA, 40 bp, Homo sapiens
ccagcactttgagagggcaagagatgccaggagtttgaga

SEQ ID NO: 69110 - DNA, 40 bp, Homo sapiens
ctcaaactcctggcatctcttgccctctcaaagtgctggt

SEQ ID NO: 69111 - DNA, 40 bp, Homo sapiens
accagcactttgagagggcaagagatgccaggagtttgag

SEQ ID NO: 69112 - DNA, 40 bp, Homo sapiens
tcaaactcctggcatctcttgccctctcaaagtgctggta

SEQ ID NO: 69113 - DNA, 40 bp, Homo sapiens
taccagcactttgagagggcaagagatgccaggagtttga

SEQ ID NO: 69114 - DNA, 40 bp, Homo sapiens
caaactcctggcatctcttgccctctcaaagtgctggtac

SEQ ID NO: 69115 - DNA, 40 bp, Homo sapiens
gtaccagcactttgagagggcaagagatgccaggagtttg

SEQ ID NO: 69116 - DNA, 40 bp, Homo sapiens
aaactcctggcatctcttgccctctcaaagtgctggtact

SEQ ID NO: 69117 - DNA, 40 bp, Homo sapiens
agtaccagcactttgagagggcaagagatgccaggagttt

SEQ ID NO: 69118 - DNA, 40 bp, Homo sapiens
aactcctggcatctcttgccctctcaaagtgctggtacta

SEQ ID NO: 69119 - DNA, 40 bp, Homo sapiens
tagtaccagcactttgagagggcaagagatgccaggagtt

SEQ ID NO: 69120 - DNA, 40 bp, Homo sapiens
actcctggcatctcttgccctctcaaagtgctggtactac

SEQ ID NO: 69121 - DNA, 40 bp, Homo sapiens
gtagtaccagcactttgagagggcaagagatgccaggagt

SEQ ID NO: 69122 - DNA, 40 bp, Homo sapiens
ctcctggcatctcttgccctctcaaagtgctggtactaca

SEQ ID NO: 69123 - DNA, 40 bp, Homo sapiens
tgtagtaccagcactttgagagggcaagagatgccaggag

SEQ ID NO: 69124 - DNA, 40 bp, Homo sapiens
tcctggcatctcttgccctctcaaagtgctggtactacag

SEQ ID NO: 69125 - DNA, 40 bp, Homo sapiens
ctgtagtaccagcactttgagagggcaagagatgccagga

SEQ ID NO: 69126 - DNA, 40 bp, Homo sapiens
cctggcatctcttgccctctcaaagtgctggtactacagg

SEQ ID NO: 69127 - DNA, 40 bp, Homo sapiens
cctgtagtaccagcactttgagagggcaagagatgccagg

SEQ ID NO: 69128 - DNA, 40 bp, Homo sapiens
ctggcatctcttgccctctcaaagtgctggtactacaggc

SEQ ID NO: 69129 - DNA, 40 bp, Homo sapiens
gcctgtagtaccagcactttgagagggcaagagatgccag

SEQ ID NO: 69130 - DNA, 40 bp, Homo sapiens
tggcatctcttgccctctcaaagtgctggtactacaggca

SEQ ID NO: 69131 - DNA, 40 bp, Homo sapiens
tgcctgtagtaccagcactttgagagggcaagagatgcca

SEQ ID NO: 69132 - DNA, 40 bp, Homo sapiens
ggcatctcttgccctctcaaagtgctggtactacaggcat

SEQ ID NO: 69133 - DNA, 40 bp, Homo sapiens
atgcctgtagtaccagcactttgagagggcaagagatgcc

SEQ ID NO: 69134 - DNA, 40 bp, Homo sapiens
gcatctcttgccctctcaaagtgctggtactacaggcatt

SEQ ID NO: 69135 - DNA, 40 bp, Homo sapiens
aatgcctgtagtaccagcactttgagagggcaagagatgc

SEQ ID NO: 69136 - DNA, 40 bp, Homo sapiens
catctcttgccctctcaaagtgctggtactacaggcatta

SEQ ID NO: 69137 - DNA, 40 bp, Homo sapiens
taatgcctgtagtaccagcactttgagagggcaagagatg

SEQ ID NO: 69138 - DNA, 40 bp, Homo sapiens
atctcttgccctctcaaagtgctggtactacaggcattag

SEQ ID NO: 69139 - DNA, 40 bp, Homo sapiens
ctaatgcctgtagtaccagcactttgagagggcaagagat

SEQ ID NO: 69140 - DNA, 40 bp, Homo sapiens
tctcttgccctctcaaagtgctggtactacaggcattagt

SEQ ID NO: 69141 - DNA, 40 bp, Homo sapiens
actaatgcctgtagtaccagcactttgagagggcaagaga

SEQ ID NO: 69142 - DNA, 40 bp, Homo sapiens
ctcttgccctctcaaagtgctggtactacaggcattagtc

SEQ ID NO: 69143 - DNA, 40 bp, Homo sapiens
gactaatgcctgtagtaccagcactttgagagggcaagag

SEQ ID NO: 69144 - DNA, 40 bp, Homo sapiens
tcttgccctctcaaagtgctggtactacaggcattagtca

SEQ ID NO: 69145 - DNA, 40 bp, Homo sapiens
tgactaatgcctgtagtaccagcactttgagagggcaaga

SEQ ID NO: 69146 - DNA, 40 bp, Homo sapiens
cttgccctctcaaagtgctggtactacaggcattagtcac

SEQ ID NO: 69147 - DNA, 40 bp, Homo sapiens
gtgactaatgcctgtagtaccagcactttgagagggcaag

SEQ ID NO: 69148 - DNA, 40 bp, Homo sapiens
ttgccctctcaaagtgctggtactacaggcattagtcacc

SEQ ID NO: 69149 - DNA, 40 bp, Homo sapiens
ggtgactaatgcctgtagtaccagcactttgagagggcaa

SEQ ID NO: 69150 - DNA, 40 bp, Homo sapiens
tgccctctcaaagtgctggtactacaggcattagtcacca

SEQ ID NO: 69151 - DNA, 40 bp, Homo sapiens
tggtgactaatgcctgtagtaccagcactttgagagggca

SEQ ID NO: 69152 - DNA, 40 bp, Homo sapiens
gccctctcaaagtgctggtactacaggcattagtcaccac

SEQ ID NO: 69153 - DNA, 40 bp, Homo sapiens
gtggtgactaatgcctgtagtaccagcactttgagagggc

SEQ ID NO: 69154 - DNA, 40 bp, Homo sapiens
ccctctcaaagtgctggtactacaggcattagtcaccaca

SEQ ID NO: 69155 - DNA, 40 bp, Homo sapiens
tgtggtgactaatgcctgtagtaccagcactttgagaggg

SEQ ID NO: 69156 - DNA, 40 bp, Homo sapiens
cctctcaaagtgctggtactacaggcattagtcaccacac

SEQ ID NO: 69157 - DNA, 40 bp, Homo sapiens
gtgtggtgactaatgcctgtagtaccagcactttgagagg

SEQ ID NO: 69158 - DNA, 40 bp, Homo sapiens
ctctcaaagtgctggtactacaggcattagtcaccacacc

SEQ ID NO: 69159 - DNA, 40 bp, Homo sapiens
ggtgtggtgactaatgcctgtagtaccagcactttgagag

SEQ ID NO: 69160 - DNA, 40 bp, Homo sapiens
tctcaaagtgctggtactacaggcattagtcaccacacct

SEQ ID NO: 69161 - DNA, 40 bp, Homo sapiens
aggtgtggtgactaatgcctgtagtaccagcactttgaga

SEQ ID NO: 69162 - DNA, 40 bp, Homo sapiens
ctcaaagtgctggtactacaggcattagtcaccacacctg

SEQ ID NO: 69163 - DNA, 40 bp, Homo sapiens
caggtgtggtgactaatgcctgtagtaccagcactttgag

SEQ ID NO: 69164 - DNA, 40 bp, Homo sapiens
tcaaagtgctggtactacaggcattagtcaccacacctga

SEQ ID NO: 69165 - DNA, 40 bp, Homo sapiens
tcaggtgtggtgactaatgcctgtagtaccagcactttga

SEQ ID NO: 69166 - DNA, 40 bp, Homo sapiens
caaagtgctggtactacaggcattagtcaccacacctgac

SEQ ID NO: 69167 - DNA, 40 bp, Homo sapiens
gtcaggtgtggtgactaatgcctgtagtaccagcactttg

SEQ ID NO: 69168 - DNA, 40 bp, Homo sapiens
aaagtgctggtactacaggcattagtcaccacacctgaca

SEQ ID NO: 69169 - DNA, 40 bp, Homo sapiens
tgtcaggtgtggtgactaatgcctgtagtaccagcacttt

SEQ ID NO: 69170 - DNA, 40 bp, Homo sapiens
aagtgctggtactacaggcattagtcaccacacctgacac

SEQ ID NO: 69171 - DNA, 40 bp, Homo sapiens
gtgtcaggtgtggtgactaatgcctgtagtaccagcactt

SEQ ID NO: 69172 - DNA, 40 bp, Homo sapiens
agtgctggtactacaggcattagtcaccacacctgacact

SEQ ID NO: 69173 - DNA, 40 bp, Homo sapiens
agtgtcaggtgtggtgactaatgcctgtagtaccagcact

SEQ ID NO: 69174 - DNA, 40 bp, Homo sapiens
gtgctggtactacaggcattagtcaccacacctgacactt

SEQ ID NO: 69175 - DNA, 40 bp, Homo sapiens
aagtgtcaggtgtggtgactaatgcctgtagtaccagcac

SEQ ID NO: 69176 - DNA, 40 bp, Homo sapiens
tgctggtactacaggcattagtcaccacacctgacactta

SEQ ID NO: 69177 - DNA, 40 bp, Homo sapiens
taagtgtcaggtgtggtgactaatgcctgtagtaccagca

SEQ ID NO: 69178 - DNA, 40 bp, Homo sapiens
gctggtactacaggcattagtcaccacacctgacacttaa

SEQ ID NO: 69179 - DNA, 40 bp, Homo sapiens
ttaagtgtcaggtgtggtgactaatgcctgtagtaccagc

SEQ ID NO: 69180 - DNA, 40 bp, Homo sapiens
ctggtactacaggcattagtcaccacacctgacacttaaa

SEQ ID NO: 69181 - DNA, 40 bp, Homo sapiens
tttaagtgtcaggtgtggtgactaatgcctgtagtaccag

SEQ ID NO: 69182 - DNA, 40 bp, Homo sapiens
tggtactacaggcattagtcaccacacctgacacttaaaa

SEQ ID NO: 69183 - DNA, 40 bp, Homo sapiens
ttttaagtgtcaggtgtggtgactaatgcctgtagtacca

SEQ ID NO: 69184 - DNA, 40 bp, Homo sapiens
ggtactacaggcattagtcaccacacctgacacttaaaat

SEQ ID NO: 69185 - DNA, 40 bp, Homo sapiens
attttaagtgtcaggtgtggtgactaatgcctgtagtacc

SEQ ID NO: 69186 - DNA, 40 bp, Homo sapiens
gtactacaggcattagtcaccacacctgacacttaaaatc

SEQ ID NO: 69187 - DNA, 40 bp, Homo sapiens
gattttaagtgtcaggtgtggtgactaatgcctgtagtac

SEQ ID NO: 69188 - DNA, 40 bp, Homo sapiens
tactacaggcattagtcaccacacctgacacttaaaatct

SEQ ID NO: 69189 - DNA, 40 bp, Homo sapiens
agattttaagtgtcaggtgtggtgactaatgcctgtagta

SEQ ID NO: 69190 - DNA, 40 bp, Homo sapiens
actacaggcattagtcaccacacctgacacttaaaatctt

SEQ ID NO: 69191 - DNA, 40 bp, Homo sapiens
aagattttaagtgtcaggtgtggtgactaatgcctgtagt

SEQ ID NO: 69192 - DNA, 40 bp, Homo sapiens
ctacaggcattagtcaccacacctgacacttaaaatcttt

SEQ ID NO: 69193 - DNA, 40 bp, Homo sapiens
aaagattttaagtgtcaggtgtggtgactaatgcctgtag

SEQ ID NO: 69194 - DNA, 40 bp, Homo sapiens
tacaggcattagtcaccacacctgacacttaaaatctttt

SEQ ID NO: 69195 - DNA, 40 bp, Homo sapiens
aaaagattttaagtgtcaggtgtggtgactaatgcctgta

SEQ ID NO: 69196 - DNA, 40 bp, Homo sapiens
acaggcattagtcaccacacctgacacttaaaatctttta

SEQ ID NO: 69197 - DNA, 40 bp, Homo sapiens
taaaagattttaagtgtcaggtgtggtgactaatgcctgt

SEQ ID NO: 69198 - DNA, 40 bp, Homo sapiens
caggcattagtcaccacacctgacacttaaaatcttttat

SEQ ID NO: 69199 - DNA, 40 bp, Homo sapiens
ataaaagattttaagtgtcaggtgtggtgactaatgcctg

SEQ ID NO: 69200 - DNA, 40 bp, Homo sapiens
aggcattagtcaccacacctgacacttaaaatcttttata

SEQ ID NO: 69201 - DNA, 40 bp, Homo sapiens
tataaaagattttaagtgtcaggtgtggtgactaatgcct

SEQ ID NO: 69202 - DNA, 40 bp, Homo sapiens
ggcattagtcaccacacctgacacttaaaatcttttatat

SEQ ID NO: 69203 - DNA, 40 bp, Homo sapiens
atataaaagattttaagtgtcaggtgtggtgactaatgcc

SEQ ID NO: 69204 - DNA, 40 bp, Homo sapiens
gcattagtcaccacacctgacacttaaaatcttttatata

SEQ ID NO: 69205 - DNA, 40 bp, Homo sapiens
tatataaaagattttaagtgtcaggtgtggtgactaatgc

SEQ ID NO: 69206 - DNA, 40 bp, Homo sapiens
cattagtcaccacacctgacacttaaaatcttttatatac

SEQ ID NO: 69207 - DNA, 40 bp, Homo sapiens
gtatataaaagattttaagtgtcaggtgtggtgactaatg

SEQ ID NO: 69208 - DNA, 40 bp, Homo sapiens
attagtcaccacacctgacacttaaaatcttttatataca

SEQ ID NO: 69209 - DNA, 40 bp, Homo sapiens
tgtatataaaagattttaagtgtcaggtgtggtgactaat

SEQ ID NO: 69210 - DNA, 40 bp, Homo sapiens
ttagtcaccacacctgacacttaaaatcttttatatacag

SEQ ID NO: 69211 - DNA, 40 bp, Homo sapiens
ctgtatataaaagattttaagtgtcaggtgtggtgactaa

SEQ ID NO: 69212 - DNA, 40 bp, Homo sapiens
tagtcaccacacctgacacttaaaatcttttatatacagg

SEQ ID NO: 69213 - DNA, 40 bp, Homo sapiens
cctgtatataaaagattttaagtgtcaggtgtggtgacta

SEQ ID NO: 69214 - DNA, 40 bp, Homo sapiens
agtcaccacacctgacacttaaaatcttttatatacaggt

SEQ ID NO: 69215 - DNA, 40 bp, Homo sapiens
acctgtatataaaagattttaagtgtcaggtgtggtgact

SEQ ID NO: 69216 - DNA, 40 bp, Homo sapiens
gtcaccacacctgacacttaaaatcttttatatacaggtg

SEQ ID NO: 69217 - DNA, 40 bp, Homo sapiens
cacctgtatataaaagattttaagtgtcaggtgtggtgac

SEQ ID NO: 69218 - DNA, 40 bp, Homo sapiens
tcaccacacctgacacttaaaatcttttatatacaggtgt

SEQ ID NO: 69219 - DNA, 40 bp, Homo sapiens
acacctgtatataaaagattttaagtgtcaggtgtggtga

SEQ ID NO: 69220 - DNA, 40 bp, Homo sapiens
caccacacctgacacttaaaatcttttatatacaggtgta

SEQ ID NO: 69221 - DNA, 40 bp, Homo sapiens
tacacctgtatataaaagattttaagtgtcaggtgtggtg

SEQ ID NO: 69222 - DNA, 40 bp, Homo sapiens
accacacctgacacttaaaatcttttatatacaggtgtaa

SEQ ID NO: 69223 - DNA, 40 bp, Homo sapiens
ttacacctgtatataaaagattttaagtgtcaggtgtggt

SEQ ID NO: 69224 - DNA, 40 bp, Homo sapiens
ccacacctgacacttaaaatcttttatatacaggtgtaag

SEQ ID NO: 69225 - DNA, 40 bp, Homo sapiens
cttacacctgtatataaaagattttaagtgtcaggtgtgg

SEQ ID NO: 69226 - DNA, 40 bp, Homo sapiens
cacacctgacacttaaaatcttttatatacaggtgtaagt

SEQ ID NO: 69227 - DNA, 40 bp, Homo sapiens
acttacacctgtatataaaagattttaagtgtcaggtgtg

SEQ ID NO: 69228 - DNA, 40 bp, Homo sapiens
acacctgacacttaaaatcttttatatacaggtgtaagtg

SEQ ID NO: 69229 - DNA, 40 bp, Homo sapiens
cacttacacctgtatataaaagattttaagtgtcaggtgt

SEQ ID NO: 69230 - DNA, 40 bp, Homo sapiens
cacctgacacttaaaatcttttatatacaggtgtaagtgg

SEQ ID NO: 69231 - DNA, 40 bp, Homo sapiens
ccacttacacctgtatataaaagattttaagtgtcaggtg

SEQ ID NO: 69232 - DNA, 40 bp, Homo sapiens
acctgacacttaaaatcttttatatacaggtgtaagtggg

SEQ ID NO: 69233 - DNA, 40 bp, Homo sapiens
cccacttacacctgtatataaaagattttaagtgtcaggt

SEQ ID NO: 69234 - DNA, 40 bp, Homo sapiens
cctgacacttaaaatcttttatatacaggtgtaagtgggt

SEQ ID NO: 69235 - DNA, 40 bp, Homo sapiens
acccacttacacctgtatataaaagattttaagtgtcagg

SEQ ID NO: 69236 - DNA, 40 bp, Homo sapiens
ctgacacttaaaatcttttatatacaggtgtaagtgggta

SEQ ID NO: 69237 - DNA, 40 bp, Homo sapiens
tacccacttacacctgtatataaaagattttaagtgtcag

SEQ ID NO: 69238 - DNA, 40 bp, Homo sapiens
tgacacttaaaatcttttatatacaggtgtaagtgggtat

SEQ ID NO: 69239 - DNA, 40 bp, Homo sapiens
atacccacttacacctgtatataaaagattttaagtgtca

SEQ ID NO: 69240 - DNA, 40 bp, Homo sapiens
gacacttaaaatcttttatatacaggtgtaagtgggtatc

SEQ ID NO: 69241 - DNA, 40 bp, Homo sapiens
gatacccacttacacctgtatataaaagattttaagtgtc

SEQ ID NO: 69242 - DNA, 40 bp, Homo sapiens
acacttaaaatcttttatatacaggtgtaagtgggtatct

SEQ ID NO: 69243 - DNA, 40 bp, Homo sapiens
agatacccacttacacctgtatataaaagattttaagtgt

SEQ ID NO: 69244 - DNA, 40 bp, Homo sapiens
cacttaaaatcttttatatacaggtgtaagtgggtatcta

SEQ ID NO: 69245 - DNA, 40 bp, Homo sapiens
tagatacccacttacacctgtatataaaagattttaagtg

SEQ ID NO: 69246 - DNA, 40 bp, Homo sapiens
acttaaaatcttttatatacaggtgtaagtgggtatctaa

SEQ ID NO: 69247 - DNA, 40 bp, Homo sapiens
ttagatacccacttacacctgtatataaaagattttaagt

SEQ ID NO: 69248 - DNA, 40 bp, Homo sapiens
cttaaaatcttttatatacaggtgtaagtgggtatctaac

SEQ ID NO: 69249 - DNA, 40 bp, Homo sapiens
gttagatacccacttacacctgtatataaaagattttaag

SEQ ID NO: 69250 - DNA, 40 bp, Homo sapiens
ttaaaatcttttatatacaggtgtaagtgggtatctaact

SEQ ID NO: 69251 - DNA, 40 bp, Homo sapiens
agttagatacccacttacacctgtatataaaagattttaa

SEQ ID NO: 69252 - DNA, 40 bp, Homo sapiens
taaaatcttttatatacaggtgtaagtgggtatctaactt

SEQ ID NO: 69253 - DNA, 40 bp, Homo sapiens
aagttagatacccacttacacctgtatataaaagatttta

SEQ ID NO: 69254 - DNA, 40 bp, Homo sapiens
aaaatcttttatatacaggtgtaagtgggtatctaactta

SEQ ID NO: 69255 - DNA, 40 bp, Homo sapiens
taagttagatacccacttacacctgtatataaaagatttt

SEQ ID NO: 69256 - DNA, 40 bp, Homo sapiens
aaatcttttatatacaggtgtaagtgggtatctaacttaa

SEQ ID NO: 69257 - DNA, 40 bp, Homo sapiens
ttaagttagatacccacttacacctgtatataaaagattt

SEQ ID NO: 69258 - DNA, 40 bp, Homo sapiens
aatcttttatatacaggtgtaagtgggtatctaacttaaa

SEQ ID NO: 69259 - DNA, 40 bp, Homo sapiens
tttaagttagatacccacttacacctgtatataaaagatt

SEQ ID NO: 69260 - DNA, 40 bp, Homo sapiens
atcttttatatacaggtgtaagtgggtatctaacttaaag

SEQ ID NO: 69261 - DNA, 40 bp, Homo sapiens
ctttaagttagatacccacttacacctgtatataaaagat

SEQ ID NO: 69262 - DNA, 40 bp, Homo sapiens
tcttttatatacaggtgtaagtgggtatctaacttaaagt

SEQ ID NO: 69263 - DNA, 40 bp, Homo sapiens
actttaagttagatacccacttacacctgtatataaaaga

SEQ ID NO: 69264 - DNA, 40 bp, Homo sapiens
cttttatatacaggtgtaagtgggtatctaacttaaagtg

SEQ ID NO: 69265 - DNA, 40 bp, Homo sapiens
cactttaagttagatacccacttacacctgtatataaaag

SEQ ID NO: 69266 - DNA, 40 bp, Homo sapiens
ttttatatacaggtgtaagtgggtatctaacttaaagtgc

SEQ ID NO: 69267 - DNA, 40 bp, Homo sapiens
gcactttaagttagatacccacttacacctgtatataaaa

SEQ ID NO: 69268 - DNA, 40 bp, Homo sapiens
tttatatacaggtgtaagtgggtatctaacttaaagtgcc

SEQ ID NO: 69269 - DNA, 40 bp, Homo sapiens
ggcactttaagttagatacccacttacacctgtatataaa

SEQ ID NO: 69270 - DNA, 40 bp, Homo sapiens
ttatatacaggtgtaagtgggtatctaacttaaagtgcca

SEQ ID NO: 69271 - DNA, 40 bp, Homo sapiens
tggcactttaagttagatacccacttacacctgtatataa

SEQ ID NO: 69272 - DNA, 40 bp, Homo sapiens
tatatacaggtgtaagtgggtatctaacttaaagtgccaa

SEQ ID NO: 69273 - DNA, 40 bp, Homo sapiens
ttggcactttaagttagatacccacttacacctgtatata

SEQ ID NO: 69274 - DNA, 40 bp, Homo sapiens
atatacaggtgtaagtgggtatctaacttaaagtgccaac

SEQ ID NO: 69275 - DNA, 40 bp, Homo sapiens
gttggcactttaagttagatacccacttacacctgtatat

SEQ ID NO: 69276 - DNA, 40 bp, Homo sapiens
tatacaggtgtaagtgggtatctaacttaaagtgccaacg

SEQ ID NO: 69277 - DNA, 40 bp, Homo sapiens
cgttggcactttaagttagatacccacttacacctgtata

SEQ ID NO: 69278 - DNA, 40 bp, Homo sapiens
atacaggtgtaagtgggtatctaacttaaagtgccaacga

SEQ ID NO: 69279 - DNA, 40 bp, Homo sapiens
tcgttggcactttaagttagatacccacttacacctgtat

SEQ ID NO: 69280 - DNA, 40 bp, Homo sapiens
tacaggtgtaagtgggtatctaacttaaagtgccaacgaa

SEQ ID NO: 69281 - DNA, 40 bp, Homo sapiens
ttcgttggcactttaagttagatacccacttacacctgta

SEQ ID NO: 69282 - DNA, 40 bp, Homo sapiens
acaggtgtaagtgggtatctaacttaaagtgccaacgaat

SEQ ID NO: 69283 - DNA, 40 bp, Homo sapiens
attcgttggcactttaagttagatacccacttacacctgt

SEQ ID NO: 69284 - DNA, 40 bp, Homo sapiens
caggtgtaagtgggtatctaacttaaagtgccaacgaatg

SEQ ID NO: 69285 - DNA, 40 bp, Homo sapiens
cattcgttggcactttaagttagatacccacttacacctg

SEQ ID NO: 69286 - DNA, 40 bp, Homo sapiens
aggtgtaagtgggtatctaacttaaagtgccaacgaatgt

SEQ ID NO: 69287 - DNA, 40 bp, Homo sapiens
acattcgttggcactttaagttagatacccacttacacct

SEQ ID NO: 69288 - DNA, 40 bp, Homo sapiens
ggtgtaagtgggtatctaacttaaagtgccaacgaatgta

SEQ ID NO: 69289 - DNA, 40 bp, Homo sapiens
tacattcgttggcactttaagttagatacccacttacacc

SEQ ID NO: 69290 - DNA, 40 bp, Homo sapiens
gtgtaagtgggtatctaacttaaagtgccaacgaatgtag

SEQ ID NO: 69291 - DNA, 40 bp, Homo sapiens
ctacattcgttggcactttaagttagatacccacttacac

SEQ ID NO: 69292 - DNA, 40 bp, Homo sapiens
tgtaagtgggtatctaacttaaagtgccaacgaatgtagt

SEQ ID NO: 69293 - DNA, 40 bp, Homo sapiens
actacattcgttggcactttaagttagatacccacttaca

SEQ ID NO: 69294 - DNA, 40 bp, Homo sapiens
gtaagtgggtatctaacttaaagtgccaacgaatgtagtt

SEQ ID NO: 69295 - DNA, 40 bp, Homo sapiens
aactacattcgttggcactttaagttagatacccacttac

SEQ ID NO: 69296 - DNA, 40 bp, Homo sapiens
taagtgggtatctaacttaaagtgccaacgaatgtagttg

SEQ ID NO: 69297 - DNA, 40 bp, Homo sapiens
caactacattcgttggcactttaagttagatacccactta

SEQ ID NO: 69298 - DNA, 40 bp, Homo sapiens
aagtgggtatctaacttaaagtgccaacgaatgtagttga

SEQ ID NO: 69299 - DNA, 40 bp, Homo sapiens
tcaactacattcgttggcactttaagttagatacccactt

SEQ ID NO: 69300 - DNA, 40 bp, Homo sapiens
agtgggtatctaacttaaagtgccaacgaatgtagttgaa

SEQ ID NO: 69301 - DNA, 40 bp, Homo sapiens
ttcaactacattcgttggcactttaagttagatacccact

SEQ ID NO: 69302 - DNA, 40 bp, Homo sapiens
gtgggtatctaacttaaagtgccaacgaatgtagttgaaa

SEQ ID NO: 69303 - DNA, 40 bp, Homo sapiens
tttcaactacattcgttggcactttaagttagatacccac

SEQ ID NO: 69304 - DNA, 40 bp, Homo sapiens
tgggtatctaacttaaagtgccaacgaatgtagttgaaag

SEQ ID NO: 69305 - DNA, 40 bp, Homo sapiens
ctttcaactacattcgttggcactttaagttagataccca

SEQ ID NO: 69306 - DNA, 40 bp, Homo sapiens
gggtatctaacttaaagtgccaacgaatgtagttgaaagt

SEQ ID NO: 69307 - DNA, 40 bp, Homo sapiens
actttcaactacattcgttggcactttaagttagataccc

SEQ ID NO: 69308 - DNA, 40 bp, Homo sapiens
ggtatctaacttaaagtgccaacgaatgtagttgaaagtt

SEQ ID NO: 69309 - DNA, 40 bp, Homo sapiens
aactttcaactacattcgttggcactttaagttagatacc

SEQ ID NO: 69310 - DNA, 40 bp, Homo sapiens
gtatctaacttaaagtgccaacgaatgtagttgaaagttt

SEQ ID NO: 69311 - DNA, 40 bp, Homo sapiens
aaactttcaactacattcgttggcactttaagttagatac

SEQ ID NO: 69312 - DNA, 40 bp, Homo sapiens
tatctaacttaaagtgccaacgaatgtagttgaaagtttg

SEQ ID NO: 69313 - DNA, 40 bp, Homo sapiens
caaactttcaactacattcgttggcactttaagttagata

SEQ ID NO: 69314 - DNA, 40 bp, Homo sapiens
atctaacttaaagtgccaacgaatgtagttgaaagtttgt

SEQ ID NO: 69315 - DNA, 40 bp, Homo sapiens
acaaactttcaactacattcgttggcactttaagttagat

SEQ ID NO: 69316 - DNA, 40 bp, Homo sapiens
tctaacttaaagtgccaacgaatgtagttgaaagtttgta

SEQ ID NO: 69317 - DNA, 40 bp, Homo sapiens
tacaaactttcaactacattcgttggcactttaagttaga

SEQ ID NO: 69318 - DNA, 40 bp, Homo sapiens
ctaacttaaagtgccaacgaatgtagttgaaagtttgtag

SEQ ID NO: 69319 - DNA, 40 bp, Homo sapiens
ctacaaactttcaactacattcgttggcactttaagttag

SEQ ID NO: 69320 - DNA, 40 bp, Homo sapiens
taacttaaagtgccaacgaatgtagttgaaagtttgtagt

SEQ ID NO: 69321 - DNA, 40 bp, Homo sapiens
actacaaactttcaactacattcgttggcactttaagtta

SEQ ID NO: 69322 - DNA, 40 bp, Homo sapiens
aacttaaagtgccaacgaatgtagttgaaagtttgtagtt

SEQ ID NO: 69323 - DNA, 40 bp, Homo sapiens
aactacaaactttcaactacattcgttggcactttaagtt

SEQ ID NO: 69324 - DNA, 40 bp, Homo sapiens
acttaaagtgccaacgaatgtagttgaaagtttgtagttg

SEQ ID NO: 69325 - DNA, 40 bp, Homo sapiens
caactacaaactttcaactacattcgttggcactttaagt

SEQ ID NO: 69326 - DNA, 40 bp, Homo sapiens
cttaaagtgccaacgaatgtagttgaaagtttgtagttgg

SEQ ID NO: 69327 - DNA, 40 bp, Homo sapiens
ccaactacaaactttcaactacattcgttggcactttaag

SEQ ID NO: 69328 - DNA, 40 bp, Homo sapiens
ttaaagtgccaacgaatgtagttgaaagtttgtagttggc

SEQ ID NO: 69329 - DNA, 40 bp, Homo sapiens
gccaactacaaactttcaactacattcgttggcactttaa

SEQ ID NO: 69330 - DNA, 40 bp, Homo sapiens
taaagtgccaacgaatgtagttgaaagtttgtagttggct

SEQ ID NO: 69331 - DNA, 40 bp, Homo sapiens
agccaactacaaactttcaactacattcgttggcacttta

SEQ ID NO: 69332 - DNA, 40 bp, Homo sapiens
aaagtgccaacgaatgtagttgaaagtttgtagttggctt

SEQ ID NO: 69333 - DNA, 40 bp, Homo sapiens
aagccaactacaaactttcaactacattcgttggcacttt

SEQ ID NO: 69334 - DNA, 40 bp, Homo sapiens
aagtgccaacgaatgtagttgaaagtttgtagttggctta

SEQ ID NO: 69335 - DNA, 40 bp, Homo sapiens
taagccaactacaaactttcaactacattcgttggcactt

SEQ ID NO: 69336 - DNA, 40 bp, Homo sapiens
agtgccaacgaatgtagttgaaagtttgtagttggcttag

SEQ ID NO: 69337 - DNA, 40 bp, Homo sapiens
ctaagccaactacaaactttcaactacattcgttggcact

SEQ ID NO: 69338 - DNA, 40 bp, Homo sapiens
gtgccaacgaatgtagttgaaagtttgtagttggcttagc

SEQ ID NO: 69339 - DNA, 40 bp, Homo sapiens
gctaagccaactacaaactttcaactacattcgttggcac

SEQ ID NO: 69340 - DNA, 40 bp, Homo sapiens
tgccaacgaatgtagttgaaagtttgtagttggcttagct

SEQ ID NO: 69341 - DNA, 40 bp, Homo sapiens
agctaagccaactacaaactttcaactacattcgttggca

SEQ ID NO: 69342 - DNA, 40 bp, Homo sapiens
gccaacgaatgtagttgaaagtttgtagttggcttagcta

SEQ ID NO: 69343 - DNA, 40 bp, Homo sapiens
tagctaagccaactacaaactttcaactacattcgttggc

SEQ ID NO: 69344 - DNA, 40 bp, Homo sapiens
ccaacgaatgtagttgaaagtttgtagttggcttagctaa

SEQ ID NO: 69345 - DNA, 40 bp, Homo sapiens
ttagctaagccaactacaaactttcaactacattcgttgg

SEQ ID NO: 69346 - DNA, 40 bp, Homo sapiens
caacgaatgtagttgaaagtttgtagttggcttagctaac

SEQ ID NO: 69347 - DNA, 40 bp, Homo sapiens
gttagctaagccaactacaaactttcaactacattcgttg

SEQ ID NO: 69348 - DNA, 40 bp, Homo sapiens
aacgaatgtagttgaaagtttgtagttggcttagctaact

SEQ ID NO: 69349 - DNA, 40 bp, Homo sapiens
agttagctaagccaactacaaactttcaactacattcgtt

SEQ ID NO: 69350 - DNA, 40 bp, Homo sapiens
acgaatgtagttgaaagtttgtagttggcttagctaacta

SEQ ID NO: 69351 - DNA, 40 bp, Homo sapiens
tagttagctaagccaactacaaactttcaactacattcgt

SEQ ID NO: 69352 - DNA, 40 bp, Homo sapiens
cgaatgtagttgaaagtttgtagttggcttagctaactag

SEQ ID NO: 69353 - DNA, 40 bp, Homo sapiens
ctagttagctaagccaactacaaactttcaactacattcg

SEQ ID NO: 69354 - DNA, 40 bp, Homo sapiens
gaatgtagttgaaagtttgtagttggcttagctaactagt

SEQ ID NO: 69355 - DNA, 40 bp, Homo sapiens
actagttagctaagccaactacaaactttcaactacattc

SEQ ID NO: 69356 - DNA, 40 bp, Homo sapiens
aatgtagttgaaagtttgtagttggcttagctaactagtt

SEQ ID NO: 69357 - DNA, 40 bp, Homo sapiens
aactagttagctaagccaactacaaactttcaactacatt

SEQ ID NO: 69358 - DNA, 40 bp, Homo sapiens
atgtagttgaaagtttgtagttggcttagctaactagtta

SEQ ID NO: 69359 - DNA, 40 bp, Homo sapiens
taactagttagctaagccaactacaaactttcaactacat

SEQ ID NO: 69360 - DNA, 40 bp, Homo sapiens
tgtagttgaaagtttgtagttggcttagctaactagttaa

SEQ ID NO: 69361 - DNA, 40 bp, Homo sapiens
ttaactagttagctaagccaactacaaactttcaactaca

SEQ ID NO: 69362 - DNA, 40 bp, Homo sapiens
gtagttgaaagtttgtagttggcttagctaactagttaac

SEQ ID NO: 69363 - DNA, 40 bp, Homo sapiens
gttaactagttagctaagccaactacaaactttcaactac

SEQ ID NO: 69364 - DNA, 40 bp, Homo sapiens
tagttgaaagtttgtagttggcttagctaactagttaact

SEQ ID NO: 69365 - DNA, 40 bp, Homo sapiens
agttaactagttagctaagccaactacaaactttcaacta

SEQ ID NO: 69366 - DNA, 40 bp, Homo sapiens
agttgaaagtttgtagttggcttagctaactagttaacta

SEQ ID NO: 69367 - DNA, 40 bp, Homo sapiens
tagttaactagttagctaagccaactacaaactttcaact

SEQ ID NO: 69368 - DNA, 40 bp, Homo sapiens
gttgaaagtttgtagttggcttagctaactagttaactaa

SEQ ID NO: 69369 - DNA, 40 bp, Homo sapiens
ttagttaactagttagctaagccaactacaaactttcaac

SEQ ID NO: 69370 - DNA, 40 bp, Homo sapiens
ttgaaagtttgtagttggcttagctaactagttaactaaa

SEQ ID NO: 69371 - DNA, 40 bp, Homo sapiens
tttagttaactagttagctaagccaactacaaactttcaa

SEQ ID NO: 69372 - DNA, 40 bp, Homo sapiens
tgaaagtttgtagttggcttagctaactagttaactaaat

SEQ ID NO: 69373 - DNA, 40 bp, Homo sapiens
atttagttaactagttagctaagccaactacaaactttca

SEQ ID NO: 69374 - DNA, 40 bp, Homo sapiens
gaaagtttgtagttggcttagctaactagttaactaaatt

SEQ ID NO: 69375 - DNA, 40 bp, Homo sapiens
aatttagttaactagttagctaagccaactacaaactttc

SEQ ID NO: 69376 - DNA, 40 bp, Homo sapiens
aaagtttgtagttggcttagctaactagttaactaaattg

SEQ ID NO: 69377 - DNA, 40 bp, Homo sapiens
caatttagttaactagttagctaagccaactacaaacttt

SEQ ID NO: 69378 - DNA, 40 bp, Homo sapiens
aagtttgtagttggcttagctaactagttaactaaattga

SEQ ID NO: 69379 - DNA, 40 bp, Homo sapiens
tcaatttagttaactagttagctaagccaactacaaactt

SEQ ID NO: 69380 - DNA, 40 bp, Homo sapiens
agtttgtagttggcttagctaactagttaactaaattgat

SEQ ID NO: 69381 - DNA, 40 bp, Homo sapiens
atcaatttagttaactagttagctaagccaactacaaact

SEQ ID NO: 69382 - DNA, 40 bp, Homo sapiens
gtttgtagttggcttagctaactagttaactaaattgatt

SEQ ID NO: 69383 - DNA, 40 bp, Homo sapiens
aatcaatttagttaactagttagctaagccaactacaaac

SEQ ID NO: 69384 - DNA, 40 bp, Homo sapiens
tttgtagttggcttagctaactagttaactaaattgattc

SEQ ID NO: 69385 - DNA, 40 bp, Homo sapiens
gaatcaatttagttaactagttagctaagccaactacaaa

SEQ ID NO: 69386 - DNA, 40 bp, Homo sapiens
ttgtagttggcttagctaactagttaactaaattgattcc

SEQ ID NO: 69387 - DNA, 40 bp, Homo sapiens
ggaatcaatttagttaactagttagctaagccaactacaa

SEQ ID NO: 69388 - DNA, 40 bp, Homo sapiens
tgtagttggcttagctaactagttaactaaattgattcca

SEQ ID NO: 69389 - DNA, 40 bp, Homo sapiens
tggaatcaatttagttaactagttagctaagccaactaca

SEQ ID NO: 69390 - DNA, 40 bp, Homo sapiens
gtagttggcttagctaactagttaactaaattgattccat

SEQ ID NO: 69391 - DNA, 40 bp, Homo sapiens
atggaatcaatttagttaactagttagctaagccaactac

SEQ ID NO: 69392 - DNA, 40 bp, Homo sapiens
tagttggcttagctaactagttaactaaattgattccatt

SEQ ID NO: 69393 - DNA, 40 bp, Homo sapiens
aatggaatcaatttagttaactagttagctaagccaacta

SEQ ID NO: 69394 - DNA, 40 bp, Homo sapiens
agttggcttagctaactagttaactaaattgattccatta

SEQ ID NO: 69395 - DNA, 40 bp, Homo sapiens
taatggaatcaatttagttaactagttagctaagccaact

SEQ ID NO: 69396 - DNA, 40 bp, Homo sapiens
gttggcttagctaactagttaactaaattgattccattaa

SEQ ID NO: 69397 - DNA, 40 bp, Homo sapiens
ttaatggaatcaatttagttaactagttagctaagccaac

SEQ ID NO: 69398 - DNA, 40 bp, Homo sapiens
ttggcttagctaactagttaactaaattgattccattaaa

SEQ ID NO: 69399 - DNA, 40 bp, Homo sapiens
tttaatggaatcaatttagttaactagttagctaagccaa

SEQ ID NO: 69400 - DNA, 40 bp, Homo sapiens
tggcttagctaactagttaactaaattgattccattaaaa

SEQ ID NO: 69401 - DNA, 40 bp, Homo sapiens
ttttaatggaatcaatttagttaactagttagctaagcca

SEQ ID NO: 69402 - DNA, 40 bp, Homo sapiens
ggcttagctaactagttaactaaattgattccattaaaaa

SEQ ID NO: 69403 - DNA, 40 bp, Homo sapiens
tttttaatggaatcaatttagttaactagttagctaagcc

SEQ ID NO: 69404 - DNA, 40 bp, Homo sapiens
gcttagctaactagttaactaaattgattccattaaaaat

SEQ ID NO: 69405 - DNA, 40 bp, Homo sapiens
atttttaatggaatcaatttagttaactagttagctaagc

SEQ ID NO: 69406 - DNA, 40 bp, Homo sapiens
cttagctaactagttaactaaattgattccattaaaaata

SEQ ID NO: 69407 - DNA, 40 bp, Homo sapiens
tatttttaatggaatcaatttagttaactagttagctaag

SEQ ID NO: 69408 - DNA, 40 bp, Homo sapiens
ttagctaactagttaactaaattgattccattaaaaataa

SEQ ID NO: 69409 - DNA, 40 bp, Homo sapiens
ttatttttaatggaatcaatttagttaactagttagctaa

SEQ ID NO: 69410 - DNA, 40 bp, Homo sapiens
tagctaactagttaactaaattgattccattaaaaataag

SEQ ID NO: 69411 - DNA, 40 bp, Homo sapiens
cttatttttaatggaatcaatttagttaactagttagcta

SEQ ID NO: 69412 - DNA, 40 bp, Homo sapiens
agctaactagttaactaaattgattccattaaaaataaga

SEQ ID NO: 69413 - DNA, 40 bp, Homo sapiens
tcttatttttaatggaatcaatttagttaactagttagct

SEQ ID NO: 69414 - DNA, 40 bp, Homo sapiens
gctaactagttaactaaattgattccattaaaaataagat

SEQ ID NO: 69415 - DNA, 40 bp, Homo sapiens
atcttatttttaatggaatcaatttagttaactagttagc

SEQ ID NO: 69416 - DNA, 40 bp, Homo sapiens
ctaactagttaactaaattgattccattaaaaataagata

SEQ ID NO: 69417 - DNA, 40 bp, Homo sapiens
tatcttatttttaatggaatcaatttagttaactagttag

SEQ ID NO: 69418 - DNA, 40 bp, Homo sapiens
taactagttaactaaattgattccattaaaaataagataa

SEQ ID NO: 69419 - DNA, 40 bp, Homo sapiens
ttatcttatttttaatggaatcaatttagttaactagtta

SEQ ID NO: 69420 - DNA, 40 bp, Homo sapiens
aactagttaactaaattgattccattaaaaataagataag

SEQ ID NO: 69421 - DNA, 40 bp, Homo sapiens
cttatcttatttttaatggaatcaatttagttaactagtt

SEQ ID NO: 69422 - DNA, 40 bp, Homo sapiens
actagttaactaaattgattccattaaaaataagataaga

SEQ ID NO: 69423 - DNA, 40 bp, Homo sapiens
tcttatcttatttttaatggaatcaatttagttaactagt

SEQ ID NO: 69424 - DNA, 40 bp, Homo sapiens
ctagttaactaaattgattccattaaaaataagataagac

SEQ ID NO: 69425 - DNA, 40 bp, Homo sapiens
gtcttatcttatttttaatggaatcaatttagttaactag

SEQ ID NO: 69426 - DNA, 40 bp, Homo sapiens
tagttaactaaattgattccattaaaaataagataagact

SEQ ID NO: 69427 - DNA, 40 bp, Homo sapiens
agtcttatcttatttttaatggaatcaatttagttaacta

SEQ ID NO: 69428 - DNA, 40 bp, Homo sapiens
agttaactaaattgattccattaaaaataagataagactg

SEQ ID NO: 69429 - DNA, 40 bp, Homo sapiens
cagtcttatcttatttttaatggaatcaatttagttaact

SEQ ID NO: 69430 - DNA, 40 bp, Homo sapiens
gttaactaaattgattccattaaaaataagataagactgc

SEQ ID NO: 69431 - DNA, 40 bp, Homo sapiens
gcagtcttatcttatttttaatggaatcaatttagttaac

SEQ ID NO: 69432 - DNA, 40 bp, Homo sapiens
ttaactaaattgattccattaaaaataagataagactgct

SEQ ID NO: 69433 - DNA, 40 bp, Homo sapiens
agcagtcttatcttatttttaatggaatcaatttagttaa

SEQ ID NO: 69434 - DNA, 40 bp, Homo sapiens
taactaaattgattccattaaaaataagataagactgctc

SEQ ID NO: 69435 - DNA, 40 bp, Homo sapiens
gagcagtcttatcttatttttaatggaatcaatttagtta

SEQ ID NO: 69436 - DNA, 40 bp, Homo sapiens
aactaaattgattccattaaaaataagataagactgctct

SEQ ID NO: 69437 - DNA, 40 bp, Homo sapiens
agagcagtcttatcttatttttaatggaatcaatttagtt

SEQ ID NO: 69438 - DNA, 40 bp, Homo sapiens
actaaattgattccattaaaaataagataagactgctctt

SEQ ID NO: 69439 - DNA, 40 bp, Homo sapiens
aagagcagtcttatcttatttttaatggaatcaatttagt

SEQ ID NO: 69440 - DNA, 40 bp, Homo sapiens
ctaaattgattccattaaaaataagataagactgctctta

SEQ ID NO: 69441 - DNA, 40 bp, Homo sapiens
taagagcagtcttatcttatttttaatggaatcaatttag

SEQ ID NO: 69442 - DNA, 40 bp, Homo sapiens
taaattgattccattaaaaataagataagactgctcttag

SEQ ID NO: 69443 - DNA, 40 bp, Homo sapiens
ctaagagcagtcttatcttatttttaatggaatcaattta

SEQ ID NO: 69444 - DNA, 40 bp, Homo sapiens
aaattgattccattaaaaataagataagactgctcttaga

SEQ ID NO: 69445 - DNA, 40 bp, Homo sapiens
tctaagagcagtcttatcttatttttaatggaatcaattt

SEQ ID NO: 69446 - DNA, 40 bp, Homo sapiens
aattgattccattaaaaataagataagactgctcttagaa

SEQ ID NO: 69447 - DNA, 40 bp, Homo sapiens
ttctaagagcagtcttatcttatttttaatggaatcaatt

SEQ ID NO: 69448 - DNA, 40 bp, Homo sapiens
attgattccattaaaaataagataagactgctcttagaat

SEQ ID NO: 69449 - DNA, 40 bp, Homo sapiens
attctaagagcagtcttatcttatttttaatggaatcaat

SEQ ID NO: 69450 - DNA, 40 bp, Homo sapiens
ttgattccattaaaaataagataagactgctcttagaata

SEQ ID NO: 69451 - DNA, 40 bp, Homo sapiens
tattctaagagcagtcttatcttatttttaatggaatcaa

SEQ ID NO: 69452 - DNA, 40 bp, Homo sapiens
tgattccattaaaaataagataagactgctcttagaatat

SEQ ID NO: 69453 - DNA, 40 bp, Homo sapiens
atattctaagagcagtcttatcttatttttaatggaatca

SEQ ID NO: 69454 - DNA, 40 bp, Homo sapiens
gattccattaaaaataagataagactgctcttagaatata

SEQ ID NO: 69455 - DNA, 40 bp, Homo sapiens
tatattctaagagcagtcttatcttatttttaatggaatc

SEQ ID NO: 69456 - DNA, 40 bp, Homo sapiens
attccattaaaaataagataagactgctcttagaatataa

SEQ ID NO: 69457 - DNA, 40 bp, Homo sapiens
ttatattctaagagcagtcttatcttatttttaatggaat

SEQ ID NO: 69458 - DNA, 40 bp, Homo sapiens
ttccattaaaaataagataagactgctcttagaatataat

SEQ ID NO: 69459 - DNA, 40 bp, Homo sapiens
attatattctaagagcagtcttatcttatttttaatggaa

SEQ ID NO: 69460 - DNA, 40 bp, Homo sapiens
tccattaaaaataagataagactgctcttagaatataatg

SEQ ID NO: 69461 - DNA, 40 bp, Homo sapiens
cattatattctaagagcagtcttatcttatttttaatgga

SEQ ID NO: 69462 - DNA, 40 bp, Homo sapiens
ccattaaaaataagataagactgctcttagaatataatga

SEQ ID NO: 69463 - DNA, 40 bp, Homo sapiens
tcattatattctaagagcagtcttatcttatttttaatgg

SEQ ID NO: 69464 - DNA, 40 bp, Homo sapiens
cattaaaaataagataagactgctcttagaatataatgat

SEQ ID NO: 69465 - DNA, 40 bp, Homo sapiens
atcattatattctaagagcagtcttatcttatttttaatg

SEQ ID NO: 69466 - DNA, 40 bp, Homo sapiens
attaaaaataagataagactgctcttagaatataatgatt

SEQ ID NO: 69467 - DNA, 40 bp, Homo sapiens
aatcattatattctaagagcagtcttatcttatttttaat

SEQ ID NO: 69468 - DNA, 40 bp, Homo sapiens
ttaaaaataagataagactgctcttagaatataatgattt

SEQ ID NO: 69469 - DNA, 40 bp, Homo sapiens
aaatcattatattctaagagcagtcttatcttatttttaa

SEQ ID NO: 69470 - DNA, 40 bp, Homo sapiens
taaaaataagataagactgctcttagaatataatgatttt

SEQ ID NO: 69471 - DNA, 40 bp, Homo sapiens
aaaatcattatattctaagagcagtcttatcttattttta

SEQ ID NO: 69472 - DNA, 40 bp, Homo sapiens
aaaaataagataagactgctcttagaatataatgattttt

SEQ ID NO: 69473 - DNA, 40 bp, Homo sapiens
aaaaatcattatattctaagagcagtcttatcttattttt

SEQ ID NO: 69474 - DNA, 40 bp, Homo sapiens
aaaataagataagactgctcttagaatataatgatttttg

SEQ ID NO: 69475 - DNA, 40 bp, Homo sapiens
caaaaatcattatattctaagagcagtcttatcttatttt

SEQ ID NO: 69476 - DNA, 40 bp, Homo sapiens
aaataagataagactgctcttagaatataatgatttttgt

SEQ ID NO: 69477 - DNA, 40 bp, Homo sapiens
acaaaaatcattatattctaagagcagtcttatcttattt

SEQ ID NO: 69478 - DNA, 40 bp, Homo sapiens
aataagataagactgctcttagaatataatgatttttgtt

SEQ ID NO: 69479 - DNA, 40 bp, Homo sapiens
aacaaaaatcattatattctaagagcagtcttatcttatt

SEQ ID NO: 69480 - DNA, 40 bp, Homo sapiens
ataagataagactgctcttagaatataatgatttttgtta

SEQ ID NO: 69481 - DNA, 40 bp, Homo sapiens
taacaaaaatcattatattctaagagcagtcttatcttat

SEQ ID NO: 69482 - DNA, 40 bp, Homo sapiens
taagataagactgctcttagaatataatgatttttgttat

SEQ ID NO: 69483 - DNA, 40 bp, Homo sapiens
ataacaaaaatcattatattctaagagcagtcttatctta

SEQ ID NO: 69484 - DNA, 40 bp, Homo sapiens
aagataagactgctcttagaatataatgatttttgttatt

SEQ ID NO: 69485 - DNA, 40 bp, Homo sapiens
aataacaaaaatcattatattctaagagcagtcttatctt

SEQ ID NO: 69486 - DNA, 40 bp, Homo sapiens
agataagactgctcttagaatataatgatttttgttattc

SEQ ID NO: 69487 - DNA, 40 bp, Homo sapiens
gaataacaaaaatcattatattctaagagcagtcttatct

SEQ ID NO: 69488 - DNA, 40 bp, Homo sapiens
gataagactgctcttagaatataatgatttttgttattcg

SEQ ID NO: 69489 - DNA, 40 bp, Homo sapiens
cgaataacaaaaatcattatattctaagagcagtcttatc

SEQ ID NO: 69490 - DNA, 40 bp, Homo sapiens
ataagactgctcttagaatataatgatttttgttattcgt

SEQ ID NO: 69491 - DNA, 40 bp, Homo sapiens
acgaataacaaaaatcattatattctaagagcagtcttat

SEQ ID NO: 69492 - DNA, 40 bp, Homo sapiens
taagactgctcttagaatataatgatttttgttattcgtt

SEQ ID NO: 69493 - DNA, 40 bp, Homo sapiens
aacgaataacaaaaatcattatattctaagagcagtctta

SEQ ID NO: 69494 - DNA, 40 bp, Homo sapiens
aagactgctcttagaatataatgatttttgttattcgtta

SEQ ID NO: 69495 - DNA, 40 bp, Homo sapiens
taacgaataacaaaaatcattatattctaagagcagtctt

SEQ ID NO: 69496 - DNA, 40 bp, Homo sapiens
agactgctcttagaatataatgatttttgttattcgttaa

SEQ ID NO: 69497 - DNA, 40 bp, Homo sapiens
ttaacgaataacaaaaatcattatattctaagagcagtct

SEQ ID NO: 69498 - DNA, 40 bp, Homo sapiens
gactgctcttagaatataatgatttttgttattcgttaaa

SEQ ID NO: 69499 - DNA, 40 bp, Homo sapiens
tttaacgaataacaaaaatcattatattctaagagcagtc

SEQ ID NO: 69500 - DNA, 40 bp, Homo sapiens
actgctcttagaatataatgatttttgttattcgttaaat

SEQ ID NO: 69501 - DNA, 40 bp, Homo sapiens
atttaacgaataacaaaaatcattatattctaagagcagt

SEQ ID NO: 69502 - DNA, 40 bp, Homo sapiens
ctgctcttagaatataatgatttttgttattcgttaaata

SEQ ID NO: 69503 - DNA, 40 bp, Homo sapiens
tatttaacgaataacaaaaatcattatattctaagagcag

SEQ ID NO: 69504 - DNA, 40 bp, Homo sapiens
tgctcttagaatataatgatttttgttattcgttaaatat

SEQ ID NO: 69505 - DNA, 40 bp, Homo sapiens
atatttaacgaataacaaaaatcattatattctaagagca

SEQ ID NO: 69506 - DNA, 40 bp, Homo sapiens
gctcttagaatataatgatttttgttattcgttaaatata

SEQ ID NO: 69507 - DNA, 40 bp, Homo sapiens
tatatttaacgaataacaaaaatcattatattctaagagc

SEQ ID NO: 69508 - DNA, 40 bp, Homo sapiens
ctcttagaatataatgatttttgttattcgttaaatataa

SEQ ID NO: 69509 - DNA, 40 bp, Homo sapiens
ttatatttaacgaataacaaaaatcattatattctaagag

SEQ ID NO: 69510 - DNA, 40 bp, Homo sapiens
tcttagaatataatgatttttgttattcgttaaatataaa

SEQ ID NO: 69511 - DNA, 40 bp, Homo sapiens
tttatatttaacgaataacaaaaatcattatattctaaga

SEQ ID NO: 69512 - DNA, 40 bp, Homo sapiens
cttagaatataatgatttttgttattcgttaaatataaat

SEQ ID NO: 69513 - DNA, 40 bp, Homo sapiens
atttatatttaacgaataacaaaaatcattatattctaag

SEQ ID NO: 69514 - DNA, 40 bp, Homo sapiens
ttagaatataatgatttttgttattcgttaaatataaata

SEQ ID NO: 69515 - DNA, 40 bp, Homo sapiens
tatttatatttaacgaataacaaaaatcattatattctaa

SEQ ID NO: 69516 - DNA, 40 bp, Homo sapiens
tagaatataatgatttttgttattcgttaaatataaatat

SEQ ID NO: 69517 - DNA, 40 bp, Homo sapiens
atatttatatttaacgaataacaaaaatcattatattcta

SEQ ID NO: 69518 - DNA, 40 bp, Homo sapiens
agaatataatgatttttgttattcgttaaatataaatata

SEQ ID NO: 69519 - DNA, 40 bp, Homo sapiens
tatatttatatttaacgaataacaaaaatcattatattct

SEQ ID NO: 69520 - DNA, 40 bp, Homo sapiens
gaatataatgatttttgttattcgttaaatataaatatat

SEQ ID NO: 69521 - DNA, 40 bp, Homo sapiens
atatatttatatttaacgaataacaaaaatcattatattc

SEQ ID NO: 69522 - DNA, 40 bp, Homo sapiens
aatataatgatttttgttattcgttaaatataaatatatc

SEQ ID NO: 69523 - DNA, 40 bp, Homo sapiens
gatatatttatatttaacgaataacaaaaatcattatatt

SEQ ID NO: 69524 - DNA, 40 bp, Homo sapiens
atataatgatttttgttattcgttaaatataaatatatca

SEQ ID NO: 69525 - DNA, 40 bp, Homo sapiens
tgatatatttatatttaacgaataacaaaaatcattatat

SEQ ID NO: 69526 - DNA, 40 bp, Homo sapiens
tataatgatttttgttattcgttaaatataaatatatcac

SEQ ID NO: 69527 - DNA, 40 bp, Homo sapiens
gtgatatatttatatttaacgaataacaaaaatcattata

SEQ ID NO: 69528 - DNA, 40 bp, Homo sapiens
ataatgatttttgttattcgttaaatataaatatatcact

SEQ ID NO: 69529 - DNA, 40 bp, Homo sapiens
agtgatatatttatatttaacgaataacaaaaatcattat

SEQ ID NO: 69530 - DNA, 40 bp, Homo sapiens
taatgatttttgttattcgttaaatataaatatatcactg

SEQ ID NO: 69531 - DNA, 40 bp, Homo sapiens
cagtgatatatttatatttaacgaataacaaaaatcatta

SEQ ID NO: 69532 - DNA, 40 bp, Homo sapiens
aatgatttttgttattcgttaaatataaatatatcactgg

SEQ ID NO: 69533 - DNA, 40 bp, Homo sapiens
ccagtgatatatttatatttaacgaataacaaaaatcatt

SEQ ID NO: 69534 - DNA, 40 bp, Homo sapiens
atgatttttgttattcgttaaatataaatatatcactgga

SEQ ID NO: 69535 - DNA, 40 bp, Homo sapiens
tccagtgatatatttatatttaacgaataacaaaaatcat

SEQ ID NO: 69536 - DNA, 40 bp, Homo sapiens
tgatttttgttattcgttaaatataaatatatcactggat

SEQ ID NO: 69537 - DNA, 40 bp, Homo sapiens
atccagtgatatatttatatttaacgaataacaaaaatca

SEQ ID NO: 69538 - DNA, 40 bp, Homo sapiens
gatttttgttattcgttaaatataaatatatcactggata

SEQ ID NO: 69539 - DNA, 40 bp, Homo sapiens
tatccagtgatatatttatatttaacgaataacaaaaatc

SEQ ID NO: 69540 - DNA, 40 bp, Homo sapiens
atttttgttattcgttaaatataaatatatcactggatag

SEQ ID NO: 69541 - DNA, 40 bp, Homo sapiens
ctatccagtgatatatttatatttaacgaataacaaaaat

SEQ ID NO: 69542 - DNA, 40 bp, Homo sapiens
tttttgttattcgttaaatataaatatatcactggatagt

SEQ ID NO: 69543 - DNA, 40 bp, Homo sapiens
actatccagtgatatatttatatttaacgaataacaaaaa

SEQ ID NO: 69544 - DNA, 40 bp, Homo sapiens
ttttgttattcgttaaatataaatatatcactggatagta

SEQ ID NO: 69545 - DNA, 40 bp, Homo sapiens
tactatccagtgatatatttatatttaacgaataacaaaa

SEQ ID NO: 69546 - DNA, 40 bp, Homo sapiens
tttgttattcgttaaatataaatatatcactggatagtat

SEQ ID NO: 69547 - DNA, 40 bp, Homo sapiens
atactatccagtgatatatttatatttaacgaataacaaa

SEQ ID NO: 69548 - DNA, 40 bp, Homo sapiens
ttgttattcgttaaatataaatatatcactggatagtata

SEQ ID NO: 69549 - DNA, 40 bp, Homo sapiens
tatactatccagtgatatatttatatttaacgaataacaa

SEQ ID NO: 69550 - DNA, 40 bp, Homo sapiens
tgttattcgttaaatataaatatatcactggatagtatat

SEQ ID NO: 69551 - DNA, 40 bp, Homo sapiens
atatactatccagtgatatatttatatttaacgaataaca

SEQ ID NO: 69552 - DNA, 40 bp, Homo sapiens
gttattcgttaaatataaatatatcactggatagtatatg

SEQ ID NO: 69553 - DNA, 40 bp, Homo sapiens
catatactatccagtgatatatttatatttaacgaataac

SEQ ID NO: 69554 - DNA, 40 bp, Homo sapiens
ttattcgttaaatataaatatatcactggatagtatatgt

SEQ ID NO: 69555 - DNA, 40 bp, Homo sapiens
acatatactatccagtgatatatttatatttaacgaataa

SEQ ID NO: 69556 - DNA, 40 bp, Homo sapiens
tattcgttaaatataaatatatcactggatagtatatgtt

SEQ ID NO: 69557 - DNA, 40 bp, Homo sapiens
aacatatactatccagtgatatatttatatttaacgaata

SEQ ID NO: 69558 - DNA, 40 bp, Homo sapiens
attcgttaaatataaatatatcactggatagtatatgtta

SEQ ID NO: 69559 - DNA, 40 bp, Homo sapiens
taacatatactatccagtgatatatttatatttaacgaat

SEQ ID NO: 69560 - DNA, 40 bp, Homo sapiens
ttcgttaaatataaatatatcactggatagtatatgttaa

SEQ ID NO: 69561 - DNA, 40 bp, Homo sapiens
ttaacatatactatccagtgatatatttatatttaacgaa

SEQ ID NO: 69562 - DNA, 40 bp, Homo sapiens
tcgttaaatataaatatatcactggatagtatatgttaat

SEQ ID NO: 69563 - DNA, 40 bp, Homo sapiens
attaacatatactatccagtgatatatttatatttaacga

SEQ ID NO: 69564 - DNA, 40 bp, Homo sapiens
cgttaaatataaatatatcactggatagtatatgttaatg

SEQ ID NO: 69565 - DNA, 40 bp, Homo sapiens
cattaacatatactatccagtgatatatttatatttaacg

SEQ ID NO: 69566 - DNA, 40 bp, Homo sapiens
gttaaatataaatatatcactggatagtatatgttaatga

SEQ ID NO: 69567 - DNA, 40 bp, Homo sapiens
tcattaacatatactatccagtgatatatttatatttaac

SEQ ID NO: 69568 - DNA, 40 bp, Homo sapiens
ttaaatataaatatatcactggatagtatatgttaatgac

SEQ ID NO: 69569 - DNA, 40 bp, Homo sapiens
gtcattaacatatactatccagtgatatatttatatttaa

SEQ ID NO: 69570 - DNA, 40 bp, Homo sapiens
taaatataaatatatcactggatagtatatgttaatgact

SEQ ID NO: 69571 - DNA, 40 bp, Homo sapiens
agtcattaacatatactatccagtgatatatttatattta

SEQ ID NO: 69572 - DNA, 40 bp, Homo sapiens
aaatataaatatatcactggatagtatatgttaatgactt

SEQ ID NO: 69573 - DNA, 40 bp, Homo sapiens
aagtcattaacatatactatccagtgatatatttatattt

SEQ ID NO: 69574 - DNA, 40 bp, Homo sapiens
aatataaatatatcactggatagtatatgttaatgacttg

SEQ ID NO: 69575 - DNA, 40 bp, Homo sapiens
caagtcattaacatatactatccagtgatatatttatatt

SEQ ID NO: 69576 - DNA, 40 bp, Homo sapiens
atataaatatatcactggatagtatatgttaatgacttga

SEQ ID NO: 69577 - DNA, 40 bp, Homo sapiens
tcaagtcattaacatatactatccagtgatatatttatat

SEQ ID NO: 69578 - DNA, 40 bp, Homo sapiens
tataaatatatcactggatagtatatgttaatgacttgag

SEQ ID NO: 69579 - DNA, 40 bp, Homo sapiens
ctcaagtcattaacatatactatccagtgatatatttata

SEQ ID NO: 69580 - DNA, 40 bp, Homo sapiens
ataaatatatcactggatagtatatgttaatgacttgaga

SEQ ID NO: 69581 - DNA, 40 bp, Homo sapiens
tctcaagtcattaacatatactatccagtgatatatttat

SEQ ID NO: 69582 - DNA, 40 bp, Homo sapiens
taaatatatcactggatagtatatgttaatgacttgagat

SEQ ID NO: 69583 - DNA, 40 bp, Homo sapiens
atctcaagtcattaacatatactatccagtgatatattta

SEQ ID NO: 69584 - DNA, 40 bp, Homo sapiens
aaatatatcactggatagtatatgttaatgacttgagata

SEQ ID NO: 69585 - DNA, 40 bp, Homo sapiens
tatctcaagtcattaacatatactatccagtgatatattt

SEQ ID NO: 69586 - DNA, 40 bp, Homo sapiens
aatatatcactggatagtatatgttaatgacttgagatac

SEQ ID NO: 69587 - DNA, 40 bp, Homo sapiens
gtatctcaagtcattaacatatactatccagtgatatatt

SEQ ID NO: 69588 - DNA, 40 bp, Homo sapiens
atatatcactggatagtatatgttaatgacttgagatacg

SEQ ID NO: 69589 - DNA, 40 bp, Homo sapiens
cgtatctcaagtcattaacatatactatccagtgatatat

SEQ ID NO: 69590 - DNA, 40 bp, Homo sapiens
tatatcactggatagtatatgttaatgacttgagatacgc

SEQ ID NO: 69591 - DNA, 40 bp, Homo sapiens
gcgtatctcaagtcattaacatatactatccagtgatata

SEQ ID NO: 69592 - DNA, 40 bp, Homo sapiens
atatcactggatagtatatgttaatgacttgagatacgca

SEQ ID NO: 69593 - DNA, 40 bp, Homo sapiens
tgcgtatctcaagtcattaacatatactatccagtgatat

SEQ ID NO: 69594 - DNA, 40 bp, Homo sapiens
tatcactggatagtatatgttaatgacttgagatacgcat

SEQ ID NO: 69595 - DNA, 40 bp, Homo sapiens
atgcgtatctcaagtcattaacatatactatccagtgata

SEQ ID NO: 69596 - DNA, 40 bp, Homo sapiens
atcactggatagtatatgttaatgacttgagatacgcatt

SEQ ID NO: 69597 - DNA, 40 bp, Homo sapiens
aatgcgtatctcaagtcattaacatatactatccagtgat

SEQ ID NO: 69598 - DNA, 40 bp, Homo sapiens
tcactggatagtatatgttaatgacttgagatacgcattt

SEQ ID NO: 69599 - DNA, 40 bp, Homo sapiens
aaatgcgtatctcaagtcattaacatatactatccagtga

SEQ ID NO: 69600 - DNA, 40 bp, Homo sapiens
cactggatagtatatgttaatgacttgagatacgcatttt

SEQ ID NO: 69601 - DNA, 40 bp, Homo sapiens
aaaatgcgtatctcaagtcattaacatatactatccagtg

SEQ ID NO: 69602 - DNA, 40 bp, Homo sapiens
actggatagtatatgttaatgacttgagatacgcatttta

SEQ ID NO: 69603 - DNA, 40 bp, Homo sapiens
taaaatgcgtatctcaagtcattaacatatactatccagt

SEQ ID NO: 69604 - DNA, 40 bp, Homo sapiens
ctggatagtatatgttaatgacttgagatacgcattttaa

SEQ ID NO: 69605 - DNA, 40 bp, Homo sapiens
ttaaaatgcgtatctcaagtcattaacatatactatccag

SEQ ID NO: 69606 - DNA, 40 bp, Homo sapiens
tggatagtatatgttaatgacttgagatacgcattttaac

SEQ ID NO: 69607 - DNA, 40 bp, Homo sapiens
gttaaaatgcgtatctcaagtcattaacatatactatcca

SEQ ID NO: 69608 - DNA, 40 bp, Homo sapiens
ggatagtatatgttaatgacttgagatacgcattttaaca

SEQ ID NO: 69609 - DNA, 40 bp, Homo sapiens
tgttaaaatgcgtatctcaagtcattaacatatactatcc

SEQ ID NO: 69610 - DNA, 40 bp, Homo sapiens
gatagtatatgttaatgacttgagatacgcattttaacat

SEQ ID NO: 69611 - DNA, 40 bp, Homo sapiens
atgttaaaatgcgtatctcaagtcattaacatatactatc

SEQ ID NO: 69612 - DNA, 40 bp, Homo sapiens
atagtatatgttaatgacttgagatacgcattttaacata

SEQ ID NO: 69613 - DNA, 40 bp, Homo sapiens
tatgttaaaatgcgtatctcaagtcattaacatatactat

SEQ ID NO: 69614 - DNA, 40 bp, Homo sapiens
tagtatatgttaatgacttgagatacgcattttaacatat

SEQ ID NO: 69615 - DNA, 40 bp, Homo sapiens
atatgttaaaatgcgtatctcaagtcattaacatatacta

SEQ ID NO: 69616 - DNA, 40 bp, Homo sapiens
agtatatgttaatgacttgagatacgcattttaacatata

SEQ ID NO: 69617 - DNA, 40 bp, Homo sapiens
tatatgttaaaatgcgtatctcaagtcattaacatatact

SEQ ID NO: 69618 - DNA, 40 bp, Homo sapiens
gtatatgttaatgacttgagatacgcattttaacatataa

SEQ ID NO: 69619 - DNA, 40 bp, Homo sapiens
ttatatgttaaaatgcgtatctcaagtcattaacatatac

SEQ ID NO: 69620 - DNA, 40 bp, Homo sapiens
tatatgttaatgacttgagatacgcattttaacatataat

SEQ ID NO: 69621 - DNA, 40 bp, Homo sapiens
attatatgttaaaatgcgtatctcaagtcattaacatata

SEQ ID NO: 69622 - DNA, 40 bp, Homo sapiens
atatgttaatgacttgagatacgcattttaacatataatc

SEQ ID NO: 69623 - DNA, 40 bp, Homo sapiens
gattatatgttaaaatgcgtatctcaagtcattaacatat

SEQ ID NO: 69624 - DNA, 40 bp, Homo sapiens
tatgttaatgacttgagatacgcattttaacatataatca

SEQ ID NO: 69625 - DNA, 40 bp, Homo sapiens
tgattatatgttaaaatgcgtatctcaagtcattaacata

SEQ ID NO: 69626 - DNA, 40 bp, Homo sapiens
atgttaatgacttgagatacgcattttaacatataatcac

SEQ ID NO: 69627 - DNA, 40 bp, Homo sapiens
gtgattatatgttaaaatgcgtatctcaagtcattaacat

SEQ ID NO: 69628 - DNA, 40 bp, Homo sapiens
tgttaatgacttgagatacgcattttaacatataatcacg

SEQ ID NO: 69629 - DNA, 40 bp, Homo sapiens
cgtgattatatgttaaaatgcgtatctcaagtcattaaca

SEQ ID NO: 69630 - DNA, 40 bp, Homo sapiens
gttaatgacttgagatacgcattttaacatataatcacgt

SEQ ID NO: 69631 - DNA, 40 bp, Homo sapiens
acgtgattatatgttaaaatgcgtatctcaagtcattaac

SEQ ID NO: 69632 - DNA, 40 bp, Homo sapiens
ttaatgacttgagatacgcattttaacatataatcacgtt

SEQ ID NO: 69633 - DNA, 40 bp, Homo sapiens
aacgtgattatatgttaaaatgcgtatctcaagtcattaa

SEQ ID NO: 69634 - DNA, 40 bp, Homo sapiens
taatgacttgagatacgcattttaacatataatcacgtta

SEQ ID NO: 69635 - DNA, 40 bp, Homo sapiens
taacgtgattatatgttaaaatgcgtatctcaagtcatta

SEQ ID NO: 69636 - DNA, 40 bp, Homo sapiens
aatgacttgagatacgcattttaacatataatcacgttac

SEQ ID NO: 69637 - DNA, 40 bp, Homo sapiens
gtaacgtgattatatgttaaaatgcgtatctcaagtcatt

SEQ ID NO: 69638 - DNA, 40 bp, Homo sapiens
atgacttgagatacgcattttaacatataatcacgttact

SEQ ID NO: 69639 - DNA, 40 bp, Homo sapiens
agtaacgtgattatatgttaaaatgcgtatctcaagtcat

SEQ ID NO: 69640 - DNA, 40 bp, Homo sapiens
tgacttgagatacgcattttaacatataatcacgttactt

SEQ ID NO: 69641 - DNA, 40 bp, Homo sapiens
aagtaacgtgattatatgttaaaatgcgtatctcaagtca

SEQ ID NO: 69642 - DNA, 40 bp, Homo sapiens
gacttgagatacgcattttaacatataatcacgttactta

SEQ ID NO: 69643 - DNA, 40 bp, Homo sapiens
taagtaacgtgattatatgttaaaatgcgtatctcaagtc

SEQ ID NO: 69644 - DNA, 40 bp, Homo sapiens
acttgagatacgcattttaacatataatcacgttacttaa

SEQ ID NO: 69645 - DNA, 40 bp, Homo sapiens
ttaagtaacgtgattatatgttaaaatgcgtatctcaagt

SEQ ID NO: 69646 - DNA, 40 bp, Homo sapiens
cttgagatacgcattttaacatataatcacgttacttaaa

SEQ ID NO: 69647 - DNA, 40 bp, Homo sapiens
tttaagtaacgtgattatatgttaaaatgcgtatctcaag

SEQ ID NO: 69648 - DNA, 40 bp, Homo sapiens
ttgagatacgcattttaacatataatcacgttacttaaat

SEQ ID NO: 69649 - DNA, 40 bp, Homo sapiens
atttaagtaacgtgattatatgttaaaatgcgtatctcaa

SEQ ID NO: 69650 - DNA, 40 bp, Homo sapiens
tgagatacgcattttaacatataatcacgttacttaaatg

SEQ ID NO: 69651 - DNA, 40 bp, Homo sapiens
catttaagtaacgtgattatatgttaaaatgcgtatctca

SEQ ID NO: 69652 - DNA, 40 bp, Homo sapiens
gagatacgcattttaacatataatcacgttacttaaatgc

SEQ ID NO: 69653 - DNA, 40 bp, Homo sapiens
gcatttaagtaacgtgattatatgttaaaatgcgtatctc

SEQ ID NO: 69654 - DNA, 40 bp, Homo sapiens
agatacgcattttaacatataatcacgttacttaaatgcc

SEQ ID NO: 69655 - DNA, 40 bp, Homo sapiens
ggcatttaagtaacgtgattatatgttaaaatgcgtatct

SEQ ID NO: 69656 - DNA, 40 bp, Homo sapiens
gatacgcattttaacatataatcacgttacttaaatgcct

SEQ ID NO: 69657 - DNA, 40 bp, Homo sapiens
aggcatttaagtaacgtgattatatgttaaaatgcgtatc

SEQ ID NO: 69658 - DNA, 40 bp, Homo sapiens
atacgcattttaacatataatcacgttacttaaatgcctg

SEQ ID NO: 69659 - DNA, 40 bp, Homo sapiens
caggcatttaagtaacgtgattatatgttaaaatgcgtat

SEQ ID NO: 69660 - DNA, 40 bp, Homo sapiens
tacgcattttaacatataatcacgttacttaaatgcctgc

SEQ ID NO: 69661 - DNA, 40 bp, Homo sapiens
gcaggcatttaagtaacgtgattatatgttaaaatgcgta

SEQ ID NO: 69662 - DNA, 40 bp, Homo sapiens
acgcattttaacatataatcacgttacttaaatgcctgcc

SEQ ID NO: 69663 - DNA, 40 bp, Homo sapiens
ggcaggcatttaagtaacgtgattatatgttaaaatgcgt

SEQ ID NO: 69664 - DNA, 40 bp, Homo sapiens
cgcattttaacatataatcacgttacttaaatgcctgcct

SEQ ID NO: 69665 - DNA, 40 bp, Homo sapiens
aggcaggcatttaagtaacgtgattatatgttaaaatgcg

SEQ ID NO: 69666 - DNA, 40 bp, Homo sapiens
gcattttaacatataatcacgttacttaaatgcctgcctt

SEQ ID NO: 69667 - DNA, 40 bp, Homo sapiens
aaggcaggcatttaagtaacgtgattatatgttaaaatgc

SEQ ID NO: 69668 - DNA, 40 bp, Homo sapiens
cattttaacatataatcacgttacttaaatgcctgccttt

SEQ ID NO: 69669 - DNA, 40 bp, Homo sapiens
aaaggcaggcatttaagtaacgtgattatatgttaaaatg

SEQ ID NO: 69670 - DNA, 40 bp, Homo sapiens
attttaacatataatcacgttacttaaatgcctgcctttg

SEQ ID NO: 69671 - DNA, 40 bp, Homo sapiens
caaaggcaggcatttaagtaacgtgattatatgttaaaat

SEQ ID NO: 69672 - DNA, 40 bp, Homo sapiens
ttttaacatataatcacgttacttaaatgcctgcctttga

SEQ ID NO: 69673 - DNA, 40 bp, Homo sapiens
tcaaaggcaggcatttaagtaacgtgattatatgttaaaa

SEQ ID NO: 69674 - DNA, 40 bp, Homo sapiens
tttaacatataatcacgttacttaaatgcctgcctttgaa

SEQ ID NO: 69675 - DNA, 40 bp, Homo sapiens
ttcaaaggcaggcatttaagtaacgtgattatatgttaaa

SEQ ID NO: 69676 - DNA, 40 bp, Homo sapiens
ttaacatataatcacgttacttaaatgcctgcctttgaac

SEQ ID NO: 69677 - DNA, 40 bp, Homo sapiens
gttcaaaggcaggcatttaagtaacgtgattatatgttaa

SEQ ID NO: 69678 - DNA, 40 bp, Homo sapiens
taacatataatcacgttacttaaatgcctgcctttgaact

SEQ ID NO: 69679 - DNA, 40 bp, Homo sapiens
agttcaaaggcaggcatttaagtaacgtgattatatgtta

SEQ ID NO: 69680 - DNA, 40 bp, Homo sapiens
aacatataatcacgttacttaaatgcctgcctttgaactg

SEQ ID NO: 69681 - DNA, 40 bp, Homo sapiens
cagttcaaaggcaggcatttaagtaacgtgattatatgtt

SEQ ID NO: 69682 - DNA, 40 bp, Homo sapiens
acatataatcacgttacttaaatgcctgcctttgaactga

SEQ ID NO: 69683 - DNA, 40 bp, Homo sapiens
tcagttcaaaggcaggcatttaagtaacgtgattatatgt

SEQ ID NO: 69684 - DNA, 40 bp, Homo sapiens
catataatcacgttacttaaatgcctgcctttgaactgaa

SEQ ID NO: 69685 - DNA, 40 bp, Homo sapiens
ttcagttcaaaggcaggcatttaagtaacgtgattatatg

SEQ ID NO: 69686 - DNA, 40 bp, Homo sapiens
atataatcacgttacttaaatgcctgcctttgaactgaaa

SEQ ID NO: 69687 - DNA, 40 bp, Homo sapiens
tttcagttcaaaggcaggcatttaagtaacgtgattatat

SEQ ID NO: 69688 - DNA, 40 bp, Homo sapiens
tataatcacgttacttaaatgcctgcctttgaactgaaac

SEQ ID NO: 69689 - DNA, 40 bp, Homo sapiens
gtttcagttcaaaggcaggcatttaagtaacgtgattata

SEQ ID NO: 69690 - DNA, 40 bp, Homo sapiens
ataatcacgttacttaaatgcctgcctttgaactgaaact

SEQ ID NO: 69691 - DNA, 40 bp, Homo sapiens
agtttcagttcaaaggcaggcatttaagtaacgtgattat

SEQ ID NO: 69692 - DNA, 40 bp, Homo sapiens
taatcacgttacttaaatgcctgcctttgaactgaaactt

SEQ ID NO: 69693 - DNA, 40 bp, Homo sapiens
aagtttcagttcaaaggcaggcatttaagtaacgtgatta

SEQ ID NO: 69694 - DNA, 40 bp, Homo sapiens
aatcacgttacttaaatgcctgcctttgaactgaaactta

SEQ ID NO: 69695 - DNA, 40 bp, Homo sapiens
taagtttcagttcaaaggcaggcatttaagtaacgtgatt

SEQ ID NO: 69696 - DNA, 40 bp, Homo sapiens
atcacgttacttaaatgcctgcctttgaactgaaacttaa

SEQ ID NO: 69697 - DNA, 40 bp, Homo sapiens
ttaagtttcagttcaaaggcaggcatttaagtaacgtgat

SEQ ID NO: 69698 - DNA, 40 bp, Homo sapiens
tcacgttacttaaatgcctgcctttgaactgaaacttaac

SEQ ID NO: 69699 - DNA, 40 bp, Homo sapiens
gttaagtttcagttcaaaggcaggcatttaagtaacgtga

SEQ ID NO: 69700 - DNA, 40 bp, Homo sapiens
cacgttacttaaatgcctgcctttgaactgaaacttaaca

SEQ ID NO: 69701 - DNA, 40 bp, Homo sapiens
tgttaagtttcagttcaaaggcaggcatttaagtaacgtg

SEQ ID NO: 69702 - DNA, 40 bp, Homo sapiens
acgttacttaaatgcctgcctttgaactgaaacttaacat

SEQ ID NO: 69703 - DNA, 40 bp, Homo sapiens
atgttaagtttcagttcaaaggcaggcatttaagtaacgt

SEQ ID NO: 69704 - DNA, 40 bp, Homo sapiens
cgttacttaaatgcctgcctttgaactgaaacttaacatt

SEQ ID NO: 69705 - DNA, 40 bp, Homo sapiens
aatgttaagtttcagttcaaaggcaggcatttaagtaacg

SEQ ID NO: 69706 - DNA, 40 bp, Homo sapiens
gttacttaaatgcctgcctttgaactgaaacttaacatta

SEQ ID NO: 69707 - DNA, 40 bp, Homo sapiens
taatgttaagtttcagttcaaaggcaggcatttaagtaac

SEQ ID NO: 69708 - DNA, 40 bp, Homo sapiens
ttacttaaatgcctgcctttgaactgaaacttaacattat

SEQ ID NO: 69709 - DNA, 40 bp, Homo sapiens
ataatgttaagtttcagttcaaaggcaggcatttaagtaa

SEQ ID NO: 69710 - DNA, 40 bp, Homo sapiens
tacttaaatgcctgcctttgaactgaaacttaacattatg

SEQ ID NO: 69711 - DNA, 40 bp, Homo sapiens
cataatgttaagtttcagttcaaaggcaggcatttaagta

SEQ ID NO: 69712 - DNA, 40 bp, Homo sapiens
acttaaatgcctgcctttgaactgaaacttaacattatga

SEQ ID NO: 69713 - DNA, 40 bp, Homo sapiens
tcataatgttaagtttcagttcaaaggcaggcatttaagt

SEQ ID NO: 69714 - DNA, 40 bp, Homo sapiens
cttaaatgcctgcctttgaactgaaacttaacattatgaa

SEQ ID NO: 69715 - DNA, 40 bp, Homo sapiens
ttcataatgttaagtttcagttcaaaggcaggcatttaag

SEQ ID NO: 69716 - DNA, 40 bp, Homo sapiens
ttaaatgcctgcctttgaactgaaacttaacattatgaat

SEQ ID NO: 69717 - DNA, 40 bp, Homo sapiens
attcataatgttaagtttcagttcaaaggcaggcatttaa

SEQ ID NO: 69718 - DNA, 40 bp, Homo sapiens
taaatgcctgcctttgaactgaaacttaacattatgaatt

SEQ ID NO: 69719 - DNA, 40 bp, Homo sapiens
aattcataatgttaagtttcagttcaaaggcaggcattta

SEQ ID NO: 69720 - DNA, 40 bp, Homo sapiens
aaatgcctgcctttgaactgaaacttaacattatgaattt

SEQ ID NO: 69721 - DNA, 40 bp, Homo sapiens
aaattcataatgttaagtttcagttcaaaggcaggcattt

SEQ ID NO: 69722 - DNA, 40 bp, Homo sapiens
aatgcctgcctttgaactgaaacttaacattatgaattta

SEQ ID NO: 69723 - DNA, 40 bp, Homo sapiens
taaattcataatgttaagtttcagttcaaaggcaggcatt

SEQ ID NO: 69724 - DNA, 40 bp, Homo sapiens
atgcctgcctttgaactgaaacttaacattatgaatttaa

SEQ ID NO: 69725 - DNA, 40 bp, Homo sapiens
ttaaattcataatgttaagtttcagttcaaaggcaggcat

SEQ ID NO: 69726 - DNA, 40 bp, Homo sapiens
tgcctgcctttgaactgaaacttaacattatgaatttaaa

SEQ ID NO: 69727 - DNA, 40 bp, Homo sapiens
tttaaattcataatgttaagtttcagttcaaaggcaggca

SEQ ID NO: 69728 - DNA, 40 bp, Homo sapiens
gcctgcctttgaactgaaacttaacattatgaatttaaat

SEQ ID NO: 69729 - DNA, 40 bp, Homo sapiens
atttaaattcataatgttaagtttcagttcaaaggcaggc

SEQ ID NO: 69730 - DNA, 40 bp, Homo sapiens
cctgcctttgaactgaaacttaacattatgaatttaaatt

SEQ ID NO: 69731 - DNA, 40 bp, Homo sapiens
aatttaaattcataatgttaagtttcagttcaaaggcagg

SEQ ID NO: 69732 - DNA, 40 bp, Homo sapiens
ctgcctttgaactgaaacttaacattatgaatttaaatta

SEQ ID NO: 69733 - DNA, 40 bp, Homo sapiens
taatttaaattcataatgttaagtttcagttcaaaggcag

SEQ ID NO: 69734 - DNA, 40 bp, Homo sapiens
tgcctttgaactgaaacttaacattatgaatttaaattaa

SEQ ID NO: 69735 - DNA, 40 bp, Homo sapiens
ttaatttaaattcataatgttaagtttcagttcaaaggca

SEQ ID NO: 69736 - DNA, 40 bp, Homo sapiens
gcctttgaactgaaacttaacattatgaatttaaattaaa

SEQ ID NO: 69737 - DNA, 40 bp, Homo sapiens
tttaatttaaattcataatgttaagtttcagttcaaaggc

SEQ ID NO: 69738 - DNA, 40 bp, Homo sapiens
cctttgaactgaaacttaacattatgaatttaaattaaag

SEQ ID NO: 69739 - DNA, 40 bp, Homo sapiens
ctttaatttaaattcataatgttaagtttcagttcaaagg

SEQ ID NO: 69740 - DNA, 40 bp, Homo sapiens
ctttgaactgaaacttaacattatgaatttaaattaaagt

SEQ ID NO: 69741 - DNA, 40 bp, Homo sapiens
actttaatttaaattcataatgttaagtttcagttcaaag

SEQ ID NO: 69742 - DNA, 40 bp, Homo sapiens
tttgaactgaaacttaacattatgaatttaaattaaagtt

SEQ ID NO: 69743 - DNA, 40 bp, Homo sapiens
aactttaatttaaattcataatgttaagtttcagttcaaa

SEQ ID NO: 69744 - DNA, 40 bp, Homo sapiens
ttgaactgaaacttaacattatgaatttaaattaaagttt

SEQ ID NO: 69745 - DNA, 40 bp, Homo sapiens
aaactttaatttaaattcataatgttaagtttcagttcaa

SEQ ID NO: 69746 - DNA, 40 bp, Homo sapiens
tgaactgaaacttaacattatgaatttaaattaaagtttg

SEQ ID NO: 69747 - DNA, 40 bp, Homo sapiens
caaactttaatttaaattcataatgttaagtttcagttca

SEQ ID NO: 69748 - DNA, 40 bp, Homo sapiens
gaactgaaacttaacattatgaatttaaattaaagtttga

SEQ ID NO: 69749 - DNA, 40 bp, Homo sapiens
tcaaactttaatttaaattcataatgttaagtttcagttc

SEQ ID NO: 69750 - DNA, 40 bp, Homo sapiens
aactgaaacttaacattatgaatttaaattaaagtttgac

SEQ ID NO: 69751 - DNA, 40 bp, Homo sapiens
gtcaaactttaatttaaattcataatgttaagtttcagtt

SEQ ID NO: 69752 - DNA, 40 bp, Homo sapiens
actgaaacttaacattatgaatttaaattaaagtttgact

SEQ ID NO: 69753 - DNA, 40 bp, Homo sapiens
agtcaaactttaatttaaattcataatgttaagtttcagt

SEQ ID NO: 69754 - DNA, 40 bp, Homo sapiens
ctgaaacttaacattatgaatttaaattaaagtttgactt

SEQ ID NO: 69755 - DNA, 40 bp, Homo sapiens
aagtcaaactttaatttaaattcataatgttaagtttcag

SEQ ID NO: 69756 - DNA, 40 bp, Homo sapiens
tgaaacttaacattatgaatttaaattaaagtttgacttt

SEQ ID NO: 69757 - DNA, 40 bp, Homo sapiens
aaagtcaaactttaatttaaattcataatgttaagtttca

SEQ ID NO: 69758 - DNA, 40 bp, Homo sapiens
gaaacttaacattatgaatttaaattaaagtttgacttta

SEQ ID NO: 69759 - DNA, 40 bp, Homo sapiens
taaagtcaaactttaatttaaattcataatgttaagtttc

SEQ ID NO: 69760 - DNA, 40 bp, Homo sapiens
aaacttaacattatgaatttaaattaaagtttgactttag

SEQ ID NO: 69761 - DNA, 40 bp, Homo sapiens
ctaaagtcaaactttaatttaaattcataatgttaagttt

SEQ ID NO: 69762 - DNA, 40 bp, Homo sapiens
aacttaacattatgaatttaaattaaagtttgactttaga

SEQ ID NO: 69763 - DNA, 40 bp, Homo sapiens
tctaaagtcaaactttaatttaaattcataatgttaagtt

SEQ ID NO: 69764 - DNA, 40 bp, Homo sapiens
acttaacattatgaatttaaattaaagtttgactttagag

SEQ ID NO: 69765 - DNA, 40 bp, Homo sapiens
ctctaaagtcaaactttaatttaaattcataatgttaagt

SEQ ID NO: 69766 - DNA, 40 bp, Homo sapiens
cttaacattatgaatttaaattaaagtttgactttagagg

SEQ ID NO: 69767 - DNA, 40 bp, Homo sapiens
cctctaaagtcaaactttaatttaaattcataatgttaag

SEQ ID NO: 69768 - DNA, 40 bp, Homo sapiens
ttaacattatgaatttaaattaaagtttgactttagaggt

SEQ ID NO: 69769 - DNA, 40 bp, Homo sapiens
acctctaaagtcaaactttaatttaaattcataatgttaa

SEQ ID NO: 69770 - DNA, 40 bp, Homo sapiens
taacattatgaatttaaattaaagtttgactttagaggta

SEQ ID NO: 69771 - DNA, 40 bp, Homo sapiens
tacctctaaagtcaaactttaatttaaattcataatgtta

SEQ ID NO: 69772 - DNA, 40 bp, Homo sapiens
aacattatgaatttaaattaaagtttgactttagaggtaa

SEQ ID NO: 69773 - DNA, 40 bp, Homo sapiens
ttacctctaaagtcaaactttaatttaaattcataatgtt

SEQ ID NO: 69774 - DNA, 40 bp, Homo sapiens
acattatgaatttaaattaaagtttgactttagaggtaaa

SEQ ID NO: 69775 - DNA, 40 bp, Homo sapiens
tttacctctaaagtcaaactttaatttaaattcataatgt

SEQ ID NO: 69776 - DNA, 40 bp, Homo sapiens
cattatgaatttaaattaaagtttgactttagaggtaaat

SEQ ID NO: 69777 - DNA, 40 bp, Homo sapiens
atttacctctaaagtcaaactttaatttaaattcataatg

SEQ ID NO: 69778 - DNA, 40 bp, Homo sapiens
attatgaatttaaattaaagtttgactttagaggtaaatt

SEQ ID NO: 69779 - DNA, 40 bp, Homo sapiens
aatttacctctaaagtcaaactttaatttaaattcataat

SEQ ID NO: 69780 - DNA, 40 bp, Homo sapiens
ttatgaatttaaattaaagtttgactttagaggtaaattt

SEQ ID NO: 69781 - DNA, 40 bp, Homo sapiens
aaatttacctctaaagtcaaactttaatttaaattcataa

SEQ ID NO: 69782 - DNA, 40 bp, Homo sapiens
tatgaatttaaattaaagtttgactttagaggtaaatttc

SEQ ID NO: 69783 - DNA, 40 bp, Homo sapiens
gaaatttacctctaaagtcaaactttaatttaaattcata

SEQ ID NO: 69784 - DNA, 40 bp, Homo sapiens
atgaatttaaattaaagtttgactttagaggtaaatttct

SEQ ID NO: 69785 - DNA, 40 bp, Homo sapiens
agaaatttacctctaaagtcaaactttaatttaaattcat

SEQ ID NO: 69786 - DNA, 40 bp, Homo sapiens
tgaatttaaattaaagtttgactttagaggtaaatttctg

SEQ ID NO: 69787 - DNA, 40 bp, Homo sapiens
cagaaatttacctctaaagtcaaactttaatttaaattca

SEQ ID NO: 69788 - DNA, 40 bp, Homo sapiens
gaatttaaattaaagtttgactttagaggtaaatttctgt

SEQ ID NO: 69789 - DNA, 40 bp, Homo sapiens
acagaaatttacctctaaagtcaaactttaatttaaattc

SEQ ID NO: 69790 - DNA, 40 bp, Homo sapiens
aatttaaattaaagtttgactttagaggtaaatttctgta

SEQ ID NO: 69791 - DNA, 40 bp, Homo sapiens
tacagaaatttacctctaaagtcaaactttaatttaaatt

SEQ ID NO: 69792 - DNA, 40 bp, Homo sapiens
atttaaattaaagtttgactttagaggtaaatttctgtac

SEQ ID NO: 69793 - DNA, 40 bp, Homo sapiens
gtacagaaatttacctctaaagtcaaactttaatttaaat

SEQ ID NO: 69794 - DNA, 40 bp, Homo sapiens
tttaaattaaagtttgactttagaggtaaatttctgtact

SEQ ID NO: 69795 - DNA, 40 bp, Homo sapiens
agtacagaaatttacctctaaagtcaaactttaatttaaa

SEQ ID NO: 69796 - DNA, 40 bp, Homo sapiens
ttaaattaaagtttgactttagaggtaaatttctgtactt

SEQ ID NO: 69797 - DNA, 40 bp, Homo sapiens
aagtacagaaatttacctctaaagtcaaactttaatttaa

SEQ ID NO: 69798 - DNA, 40 bp, Homo sapiens
taaattaaagtttgactttagaggtaaatttctgtacttt

SEQ ID NO: 69799 - DNA, 40 bp, Homo sapiens
aaagtacagaaatttacctctaaagtcaaactttaattta

SEQ ID NO: 69800 - DNA, 40 bp, Homo sapiens
aaattaaagtttgactttagaggtaaatttctgtacttta

SEQ ID NO: 69801 - DNA, 40 bp, Homo sapiens
taaagtacagaaatttacctctaaagtcaaactttaattt

SEQ ID NO: 69802 - DNA, 40 bp, Homo sapiens
aattaaagtttgactttagaggtaaatttctgtactttac

SEQ ID NO: 69803 - DNA, 40 bp, Homo sapiens
gtaaagtacagaaatttacctctaaagtcaaactttaatt

SEQ ID NO: 69804 - DNA, 40 bp, Homo sapiens
attaaagtttgactttagaggtaaatttctgtactttact

SEQ ID NO: 69805 - DNA, 40 bp, Homo sapiens
agtaaagtacagaaatttacctctaaagtcaaactttaat

SEQ ID NO: 69806 - DNA, 40 bp, Homo sapiens
ttaaagtttgactttagaggtaaatttctgtactttacta

SEQ ID NO: 69807 - DNA, 40 bp, Homo sapiens
tagtaaagtacagaaatttacctctaaagtcaaactttaa

SEQ ID NO: 69808 - DNA, 40 bp, Homo sapiens
taaagtttgactttagaggtaaatttctgtactttactaa

SEQ ID NO: 69809 - DNA, 40 bp, Homo sapiens
ttagtaaagtacagaaatttacctctaaagtcaaacttta

SEQ ID NO: 69810 - DNA, 40 bp, Homo sapiens
aaagtttgactttagaggtaaatttctgtactttactaaa

SEQ ID NO: 69811 - DNA, 40 bp, Homo sapiens
tttagtaaagtacagaaatttacctctaaagtcaaacttt

SEQ ID NO: 69812 - DNA, 40 bp, Homo sapiens
aagtttgactttagaggtaaatttctgtactttactaaag

SEQ ID NO: 69813 - DNA, 40 bp, Homo sapiens
ctttagtaaagtacagaaatttacctctaaagtcaaactt

SEQ ID NO: 69814 - DNA, 40 bp, Homo sapiens
agtttgactttagaggtaaatttctgtactttactaaagc

SEQ ID NO: 69815 - DNA, 40 bp, Homo sapiens
gctttagtaaagtacagaaatttacctctaaagtcaaact

SEQ ID NO: 69816 - DNA, 40 bp, Homo sapiens
gtttgactttagaggtaaatttctgtactttactaaagca

SEQ ID NO: 69817 - DNA, 40 bp, Homo sapiens
tgctttagtaaagtacagaaatttacctctaaagtcaaac

SEQ ID NO: 69818 - DNA, 40 bp, Homo sapiens
tttgactttagaggtaaatttctgtactttactaaagcag

SEQ ID NO: 69819 - DNA, 40 bp, Homo sapiens
ctgctttagtaaagtacagaaatttacctctaaagtcaaa

SEQ ID NO: 69820 - DNA, 40 bp, Homo sapiens
ttgactttagaggtaaatttctgtactttactaaagcagt

SEQ ID NO: 69821 - DNA, 40 bp, Homo sapiens
actgctttagtaaagtacagaaatttacctctaaagtcaa

SEQ ID NO: 69822 - DNA, 40 bp, Homo sapiens
tgactttagaggtaaatttctgtactttactaaagcagtt

SEQ ID NO: 69823 - DNA, 40 bp, Homo sapiens
aactgctttagtaaagtacagaaatttacctctaaagtca

SEQ ID NO: 69824 - DNA, 40 bp, Homo sapiens
gactttagaggtaaatttctgtactttactaaagcagttc

SEQ ID NO: 69825 - DNA, 40 bp, Homo sapiens
gaactgctttagtaaagtacagaaatttacctctaaagtc

SEQ ID NO: 69826 - DNA, 40 bp, Homo sapiens
actttagaggtaaatttctgtactttactaaagcagttct

SEQ ID NO: 69827 - DNA, 40 bp, Homo sapiens
agaactgctttagtaaagtacagaaatttacctctaaagt

SEQ ID NO: 69828 - DNA, 40 bp, Homo sapiens
ctttagaggtaaatttctgtactttactaaagcagttctt

SEQ ID NO: 69829 - DNA, 40 bp, Homo sapiens
aagaactgctttagtaaagtacagaaatttacctctaaag

SEQ ID NO: 69830 - DNA, 40 bp, Homo sapiens
tttagaggtaaatttctgtactttactaaagcagttctta

SEQ ID NO: 69831 - DNA, 40 bp, Homo sapiens
taagaactgctttagtaaagtacagaaatttacctctaaa

SEQ ID NO: 69832 - DNA, 40 bp, Homo sapiens
ttagaggtaaatttctgtactttactaaagcagttcttaa

SEQ ID NO: 69833 - DNA, 40 bp, Homo sapiens
ttaagaactgctttagtaaagtacagaaatttacctctaa

SEQ ID NO: 69834 - DNA, 40 bp, Homo sapiens
tagaggtaaatttctgtactttactaaagcagttcttaat

SEQ ID NO: 69835 - DNA, 40 bp, Homo sapiens
attaagaactgctttagtaaagtacagaaatttacctcta

SEQ ID NO: 69836 - DNA, 40 bp, Homo sapiens
agaggtaaatttctgtactttactaaagcagttcttaata

SEQ ID NO: 69837 - DNA, 40 bp, Homo sapiens
tattaagaactgctttagtaaagtacagaaatttacctct

SEQ ID NO: 69838 - DNA, 40 bp, Homo sapiens
gaggtaaatttctgtactttactaaagcagttcttaatat

SEQ ID NO: 69839 - DNA, 40 bp, Homo sapiens
atattaagaactgctttagtaaagtacagaaatttacctc

SEQ ID NO: 69840 - DNA, 40 bp, Homo sapiens
aggtaaatttctgtactttactaaagcagttcttaatata

SEQ ID NO: 69841 - DNA, 40 bp, Homo sapiens
tatattaagaactgctttagtaaagtacagaaatttacct

SEQ ID NO: 69842 - DNA, 40 bp, Homo sapiens
ggtaaatttctgtactttactaaagcagttcttaatataa

SEQ ID NO: 69843 - DNA, 40 bp, Homo sapiens
ttatattaagaactgctttagtaaagtacagaaatttacc

SEQ ID NO: 69844 - DNA, 40 bp, Homo sapiens
gtaaatttctgtactttactaaagcagttcttaatataat

SEQ ID NO: 69845 - DNA, 40 bp, Homo sapiens
attatattaagaactgctttagtaaagtacagaaatttac

SEQ ID NO: 69846 - DNA, 40 bp, Homo sapiens
taaatttctgtactttactaaagcagttcttaatataatt

SEQ ID NO: 69847 - DNA, 40 bp, Homo sapiens
aattatattaagaactgctttagtaaagtacagaaattta

SEQ ID NO: 69848 - DNA, 40 bp, Homo sapiens
aaatttctgtactttactaaagcagttcttaatataattc

SEQ ID NO: 69849 - DNA, 40 bp, Homo sapiens
gaattatattaagaactgctttagtaaagtacagaaattt

SEQ ID NO: 69850 - DNA, 40 bp, Homo sapiens
aatttctgtactttactaaagcagttcttaatataattct

SEQ ID NO: 69851 - DNA, 40 bp, Homo sapiens
agaattatattaagaactgctttagtaaagtacagaaatt

SEQ ID NO: 69852 - DNA, 40 bp, Homo sapiens
atttctgtactttactaaagcagttcttaatataattctg

SEQ ID NO: 69853 - DNA, 40 bp, Homo sapiens
cagaattatattaagaactgctttagtaaagtacagaaat

SEQ ID NO: 69854 - DNA, 40 bp, Homo sapiens
tttctgtactttactaaagcagttcttaatataattctga

SEQ ID NO: 69855 - DNA, 40 bp, Homo sapiens
tcagaattatattaagaactgctttagtaaagtacagaaa

SEQ ID NO: 69856 - DNA, 40 bp, Homo sapiens
ttctgtactttactaaagcagttcttaatataattctgag

SEQ ID NO: 69857 - DNA, 40 bp, Homo sapiens
ctcagaattatattaagaactgctttagtaaagtacagaa

SEQ ID NO: 69858 - DNA, 40 bp, Homo sapiens
tctgtactttactaaagcagttcttaatataattctgaga

SEQ ID NO: 69859 - DNA, 40 bp, Homo sapiens
tctcagaattatattaagaactgctttagtaaagtacaga

SEQ ID NO: 69860 - DNA, 40 bp, Homo sapiens
ctgtactttactaaagcagttcttaatataattctgagat

SEQ ID NO: 69861 - DNA, 40 bp, Homo sapiens
atctcagaattatattaagaactgctttagtaaagtacag

SEQ ID NO: 69862 - DNA, 40 bp, Homo sapiens
tgtactttactaaagcagttcttaatataattctgagatt

SEQ ID NO: 69863 - DNA, 40 bp, Homo sapiens
aatctcagaattatattaagaactgctttagtaaagtaca

SEQ ID NO: 69864 - DNA, 40 bp, Homo sapiens
gtactttactaaagcagttcttaatataattctgagattt

SEQ ID NO: 69865 - DNA, 40 bp, Homo sapiens
aaatctcagaattatattaagaactgctttagtaaagtac

SEQ ID NO: 69866 - DNA, 40 bp, Homo sapiens
tactttactaaagcagttcttaatataattctgagatttc

SEQ ID NO: 69867 - DNA, 40 bp, Homo sapiens
gaaatctcagaattatattaagaactgctttagtaaagta

SEQ ID NO: 69868 - DNA, 40 bp, Homo sapiens
actttactaaagcagttcttaatataattctgagatttct

SEQ ID NO: 69869 - DNA, 40 bp, Homo sapiens
agaaatctcagaattatattaagaactgctttagtaaagt

SEQ ID NO: 69870 - DNA, 40 bp, Homo sapiens
ctttactaaagcagttcttaatataattctgagatttcta

SEQ ID NO: 69871 - DNA, 40 bp, Homo sapiens
tagaaatctcagaattatattaagaactgctttagtaaag

SEQ ID NO: 69872 - DNA, 40 bp, Homo sapiens
tttactaaagcagttcttaatataattctgagatttctaa

SEQ ID NO: 69873 - DNA, 40 bp, Homo sapiens
ttagaaatctcagaattatattaagaactgctttagtaaa

SEQ ID NO: 69874 - DNA, 40 bp, Homo sapiens
ttactaaagcagttcttaatataattctgagatttctaaa

SEQ ID NO: 69875 - DNA, 40 bp, Homo sapiens
tttagaaatctcagaattatattaagaactgctttagtaa

SEQ ID NO: 69876 - DNA, 40 bp, Homo sapiens
tactaaagcagttcttaatataattctgagatttctaaaa

SEQ ID NO: 69877 - DNA, 40 bp, Homo sapiens
ttttagaaatctcagaattatattaagaactgctttagta

SEQ ID NO: 69878 - DNA, 40 bp, Homo sapiens
actaaagcagttcttaatataattctgagatttctaaaaa

SEQ ID NO: 69879 - DNA, 40 bp, Homo sapiens
tttttagaaatctcagaattatattaagaactgctttagt

SEQ ID NO: 69880 - DNA, 40 bp, Homo sapiens
ctaaagcagttcttaatataattctgagatttctaaaaat

SEQ ID NO: 69881 - DNA, 40 bp, Homo sapiens
atttttagaaatctcagaattatattaagaactgctttag

SEQ ID NO: 69882 - DNA, 40 bp, Homo sapiens
taaagcagttcttaatataattctgagatttctaaaaatt

SEQ ID NO: 69883 - DNA, 40 bp, Homo sapiens
aatttttagaaatctcagaattatattaagaactgcttta

SEQ ID NO: 69884 - DNA, 40 bp, Homo sapiens
aaagcagttcttaatataattctgagatttctaaaaatta

SEQ ID NO: 69885 - DNA, 40 bp, Homo sapiens
taatttttagaaatctcagaattatattaagaactgcttt

SEQ ID NO: 69886 - DNA, 40 bp, Homo sapiens
aagcagttcttaatataattctgagatttctaaaaattag

SEQ ID NO: 69887 - DNA, 40 bp, Homo sapiens
ctaatttttagaaatctcagaattatattaagaactgctt

SEQ ID NO: 69888 - DNA, 40 bp, Homo sapiens
agcagttcttaatataattctgagatttctaaaaattagt

SEQ ID NO: 69889 - DNA, 40 bp, Homo sapiens
actaatttttagaaatctcagaattatattaagaactgct

SEQ ID NO: 69890 - DNA, 40 bp, Homo sapiens
gcagttcttaatataattctgagatttctaaaaattagtg

SEQ ID NO: 69891 - DNA, 40 bp, Homo sapiens
cactaatttttagaaatctcagaattatattaagaactgc

SEQ ID NO: 69892 - DNA, 40 bp, Homo sapiens
cagttcttaatataattctgagatttctaaaaattagtgt

SEQ ID NO: 69893 - DNA, 40 bp, Homo sapiens
acactaatttttagaaatctcagaattatattaagaactg

SEQ ID NO: 69894 - DNA, 40 bp, Homo sapiens
agttcttaatataattctgagatttctaaaaattagtgtg

SEQ ID NO: 69895 - DNA, 40 bp, Homo sapiens
cacactaatttttagaaatctcagaattatattaagaact

SEQ ID NO: 69896 - DNA, 40 bp, Homo sapiens
gttcttaatataattctgagatttctaaaaattagtgtgc

SEQ ID NO: 69897 - DNA, 40 bp, Homo sapiens
gcacactaatttttagaaatctcagaattatattaagaac

SEQ ID NO: 69898 - DNA, 40 bp, Homo sapiens
ttcttaatataattctgagatttctaaaaattagtgtgcc

SEQ ID NO: 69899 - DNA, 40 bp, Homo sapiens
ggcacactaatttttagaaatctcagaattatattaagaa

SEQ ID NO: 69900 - DNA, 40 bp, Homo sapiens
tcttaatataattctgagatttctaaaaattagtgtgccc

SEQ ID NO: 69901 - DNA, 40 bp, Homo sapiens
gggcacactaatttttagaaatctcagaattatattaaga

SEQ ID NO: 69902 - DNA, 40 bp, Homo sapiens
cttaatataattctgagatttctaaaaattagtgtgccct

SEQ ID NO: 69903 - DNA, 40 bp, Homo sapiens
agggcacactaatttttagaaatctcagaattatattaag

SEQ ID NO: 69904 - DNA, 40 bp, Homo sapiens
ttaatataattctgagatttctaaaaattagtgtgcccta

SEQ ID NO: 69905 - DNA, 40 bp, Homo sapiens
tagggcacactaatttttagaaatctcagaattatattaa

SEQ ID NO: 69906 - DNA, 40 bp, Homo sapiens
taatataattctgagatttctaaaaattagtgtgccctaa

SEQ ID NO: 69907 - DNA, 40 bp, Homo sapiens
ttagggcacactaatttttagaaatctcagaattatatta

SEQ ID NO: 69908 - DNA, 40 bp, Homo sapiens
aatataattctgagatttctaaaaattagtgtgccctaaa

SEQ ID NO: 69909 - DNA, 40 bp, Homo sapiens
tttagggcacactaatttttagaaatctcagaattatatt

SEQ ID NO: 69910 - DNA, 40 bp, Homo sapiens
atataattctgagatttctaaaaattagtgtgccctaaag

SEQ ID NO: 69911 - DNA, 40 bp, Homo sapiens
ctttagggcacactaatttttagaaatctcagaattatat

SEQ ID NO: 69912 - DNA, 40 bp, Homo sapiens
tataattctgagatttctaaaaattagtgtgccctaaaga

SEQ ID NO: 69913 - DNA, 40 bp, Homo sapiens
tctttagggcacactaatttttagaaatctcagaattata

SEQ ID NO: 69914 - DNA, 40 bp, Homo sapiens
ataattctgagatttctaaaaattagtgtgccctaaagaa

SEQ ID NO: 69915 - DNA, 40 bp, Homo sapiens
ttctttagggcacactaatttttagaaatctcagaattat

SEQ ID NO: 69916 - DNA, 40 bp, Homo sapiens
taattctgagatttctaaaaattagtgtgccctaaagaat

SEQ ID NO: 69917 - DNA, 40 bp, Homo sapiens
attctttagggcacactaatttttagaaatctcagaatta

SEQ ID NO: 69918 - DNA, 40 bp, Homo sapiens
aattctgagatttctaaaaattagtgtgccctaaagaatt

SEQ ID NO: 69919 - DNA, 40 bp, Homo sapiens
aattctttagggcacactaatttttagaaatctcagaatt

SEQ ID NO: 69920 - DNA, 40 bp, Homo sapiens
attctgagatttctaaaaattagtgtgccctaaagaattg

SEQ ID NO: 69921 - DNA, 40 bp, Homo sapiens
caattctttagggcacactaatttttagaaatctcagaat

SEQ ID NO: 69922 - DNA, 40 bp, Homo sapiens
ttctgagatttctaaaaattagtgtgccctaaagaattga

SEQ ID NO: 69923 - DNA, 40 bp, Homo sapiens
tcaattctttagggcacactaatttttagaaatctcagaa

SEQ ID NO: 69924 - DNA, 40 bp, Homo sapiens
tctgagatttctaaaaattagtgtgccctaaagaattgag

SEQ ID NO: 69925 - DNA, 40 bp, Homo sapiens
ctcaattctttagggcacactaatttttagaaatctcaga

SEQ ID NO: 69926 - DNA, 40 bp, Homo sapiens
ctgagatttctaaaaattagtgtgccctaaagaattgagg

SEQ ID NO: 69927 - DNA, 40 bp, Homo sapiens
cctcaattctttagggcacactaatttttagaaatctcag

SEQ ID NO: 69928 - DNA, 40 bp, Homo sapiens
tgagatttctaaaaattagtgtgccctaaagaattgaggt

SEQ ID NO: 69929 - DNA, 40 bp, Homo sapiens
acctcaattctttagggcacactaatttttagaaatctca

SEQ ID NO: 69930 - DNA, 40 bp, Homo sapiens
gagatttctaaaaattagtgtgccctaaagaattgaggtg

SEQ ID NO: 69931 - DNA, 40 bp, Homo sapiens
cacctcaattctttagggcacactaatttttagaaatctc

SEQ ID NO: 69932 - DNA, 40 bp, Homo sapiens
agatttctaaaaattagtgtgccctaaagaattgaggtgt

SEQ ID NO: 69933 - DNA, 40 bp, Homo sapiens
acacctcaattctttagggcacactaatttttagaaatct

SEQ ID NO: 69934 - DNA, 40 bp, Homo sapiens
gatttctaaaaattagtgtgccctaaagaattgaggtgtg

SEQ ID NO: 69935 - DNA, 40 bp, Homo sapiens
cacacctcaattctttagggcacactaatttttagaaatc

SEQ ID NO: 69936 - DNA, 40 bp, Homo sapiens
atttctaaaaattagtgtgccctaaagaattgaggtgtgt

SEQ ID NO: 69937 - DNA, 40 bp, Homo sapiens
acacacctcaattctttagggcacactaatttttagaaat

SEQ ID NO: 69938 - DNA, 40 bp, Homo sapiens
tttctaaaaattagtgtgccctaaagaattgaggtgtgtt

SEQ ID NO: 69939 - DNA, 40 bp, Homo sapiens
aacacacctcaattctttagggcacactaatttttagaaa

SEQ ID NO: 69940 - DNA, 40 bp, Homo sapiens
ttctaaaaattagtgtgccctaaagaattgaggtgtgttt

SEQ ID NO: 69941 - DNA, 40 bp, Homo sapiens
aaacacacctcaattctttagggcacactaatttttagaa

SEQ ID NO: 69942 - DNA, 40 bp, Homo sapiens
tctaaaaattagtgtgccctaaagaattgaggtgtgtttt

SEQ ID NO: 69943 - DNA, 40 bp, Homo sapiens
aaaacacacctcaattctttagggcacactaatttttaga

SEQ ID NO: 69944 - DNA, 40 bp, Homo sapiens
ctaaaaattagtgtgccctaaagaattgaggtgtgttttt

SEQ ID NO: 69945 - DNA, 40 bp, Homo sapiens
aaaaacacacctcaattctttagggcacactaatttttag

SEQ ID NO: 69946 - DNA, 40 bp, Homo sapiens
taaaaattagtgtgccctaaagaattgaggtgtgtttttc

SEQ ID NO: 69947 - DNA, 40 bp, Homo sapiens
gaaaaacacacctcaattctttagggcacactaattttta

SEQ ID NO: 69948 - DNA, 40 bp, Homo sapiens
aaaaattagtgtgccctaaagaattgaggtgtgtttttct

SEQ ID NO: 69949 - DNA, 40 bp, Homo sapiens
agaaaaacacacctcaattctttagggcacactaattttt

SEQ ID NO: 69950 - DNA, 40 bp, Homo sapiens
aaaattagtgtgccctaaagaattgaggtgtgtttttctt

SEQ ID NO: 69951 - DNA, 40 bp, Homo sapiens
aagaaaaacacacctcaattctttagggcacactaatttt

SEQ ID NO: 69952 - DNA, 40 bp, Homo sapiens
aaattagtgtgccctaaagaattgaggtgtgtttttctta

SEQ ID NO: 69953 - DNA, 40 bp, Homo sapiens
taagaaaaacacacctcaattctttagggcacactaattt

SEQ ID NO: 69954 - DNA, 40 bp, Homo sapiens
aattagtgtgccctaaagaattgaggtgtgtttttcttaa

SEQ ID NO: 69955 - DNA, 40 bp, Homo sapiens
ttaagaaaaacacacctcaattctttagggcacactaatt

SEQ ID NO: 69956 - DNA, 40 bp, Homo sapiens
attagtgtgccctaaagaattgaggtgtgtttttcttaac

SEQ ID NO: 69957 - DNA, 40 bp, Homo sapiens
gttaagaaaaacacacctcaattctttagggcacactaat

SEQ ID NO: 69958 - DNA, 40 bp, Homo sapiens
ttagtgtgccctaaagaattgaggtgtgtttttcttaact

SEQ ID NO: 69959 - DNA, 40 bp, Homo sapiens
agttaagaaaaacacacctcaattctttagggcacactaa

SEQ ID NO: 69960 - DNA, 40 bp, Homo sapiens
tagtgtgccctaaagaattgaggtgtgtttttcttaacta

SEQ ID NO: 69961 - DNA, 40 bp, Homo sapiens
tagttaagaaaaacacacctcaattctttagggcacacta

SEQ ID NO: 69962 - DNA, 40 bp, Homo sapiens
agtgtgccctaaagaattgaggtgtgtttttcttaactac

SEQ ID NO: 69963 - DNA, 40 bp, Homo sapiens
gtagttaagaaaaacacacctcaattctttagggcacact

SEQ ID NO: 69964 - DNA, 40 bp, Homo sapiens
gtgtgccctaaagaattgaggtgtgtttttcttaactact

SEQ ID NO: 69965 - DNA, 40 bp, Homo sapiens
agtagttaagaaaaacacacctcaattctttagggcacac

SEQ ID NO: 69966 - DNA, 40 bp, Homo sapiens
tgtgccctaaagaattgaggtgtgtttttcttaactactg

SEQ ID NO: 69967 - DNA, 40 bp, Homo sapiens
cagtagttaagaaaaacacacctcaattctttagggcaca

SEQ ID NO: 69968 - DNA, 40 bp, Homo sapiens
gtgccctaaagaattgaggtgtgtttttcttaactactgt

SEQ ID NO: 69969 - DNA, 40 bp, Homo sapiens
acagtagttaagaaaaacacacctcaattctttagggcac

SEQ ID NO: 69970 - DNA, 40 bp, Homo sapiens
tgccctaaagaattgaggtgtgtttttcttaactactgta

SEQ ID NO: 69971 - DNA, 40 bp, Homo sapiens
tacagtagttaagaaaaacacacctcaattctttagggca

SEQ ID NO: 69972 - DNA, 40 bp, Homo sapiens
gccctaaagaattgaggtgtgtttttcttaactactgtag

SEQ ID NO: 69973 - DNA, 40 bp, Homo sapiens
ctacagtagttaagaaaaacacacctcaattctttagggc

SEQ ID NO: 69974 - DNA, 40 bp, Homo sapiens
ccctaaagaattgaggtgtgtttttcttaactactgtagg

SEQ ID NO: 69975 - DNA, 40 bp, Homo sapiens
cctacagtagttaagaaaaacacacctcaattctttaggg

SEQ ID NO: 69976 - DNA, 40 bp, Homo sapiens
cctaaagaattgaggtgtgtttttcttaactactgtaggc

SEQ ID NO: 69977 - DNA, 40 bp, Homo sapiens
gcctacagtagttaagaaaaacacacctcaattctttagg

SEQ ID NO: 69978 - DNA, 40 bp, Homo sapiens
ctaaagaattgaggtgtgtttttcttaactactgtaggca

SEQ ID NO: 69979 - DNA, 40 bp, Homo sapiens
tgcctacagtagttaagaaaaacacacctcaattctttag

SEQ ID NO: 69980 - DNA, 40 bp, Homo sapiens
taaagaattgaggtgtgtttttcttaactactgtaggcag

SEQ ID NO: 69981 - DNA, 40 bp, Homo sapiens
ctgcctacagtagttaagaaaaacacacctcaattcttta

SEQ ID NO: 69982 - DNA, 40 bp, Homo sapiens
aaagaattgaggtgtgtttttcttaactactgtaggcagt

SEQ ID NO: 69983 - DNA, 40 bp, Homo sapiens
actgcctacagtagttaagaaaaacacacctcaattcttt

SEQ ID NO: 69984 - DNA, 40 bp, Homo sapiens
aagaattgaggtgtgtttttcttaactactgtaggcagta

SEQ ID NO: 69985 - DNA, 40 bp, Homo sapiens
tactgcctacagtagttaagaaaaacacacctcaattctt

SEQ ID NO: 69986 - DNA, 40 bp, Homo sapiens
agaattgaggtgtgtttttcttaactactgtaggcagtag

SEQ ID NO: 69987 - DNA, 40 bp, Homo sapiens
ctactgcctacagtagttaagaaaaacacacctcaattct

SEQ ID NO: 69988 - DNA, 40 bp, Homo sapiens
gaattgaggtgtgtttttcttaactactgtaggcagtaga

SEQ ID NO: 69989 - DNA, 40 bp, Homo sapiens
tctactgcctacagtagttaagaaaaacacacctcaattc

SEQ ID NO: 69990 - DNA, 40 bp, Homo sapiens
aattgaggtgtgtttttcttaactactgtaggcagtagat

SEQ ID NO: 69991 - DNA, 40 bp, Homo sapiens
atctactgcctacagtagttaagaaaaacacacctcaatt

SEQ ID NO: 69992 - DNA, 40 bp, Homo sapiens
attgaggtgtgtttttcttaactactgtaggcagtagatg

SEQ ID NO: 69993 - DNA, 40 bp, Homo sapiens
catctactgcctacagtagttaagaaaaacacacctcaat

SEQ ID NO: 69994 - DNA, 40 bp, Homo sapiens
ttgaggtgtgtttttcttaactactgtaggcagtagatgt

SEQ ID NO: 69995 - DNA, 40 bp, Homo sapiens
acatctactgcctacagtagttaagaaaaacacacctcaa

SEQ ID NO: 69996 - DNA, 40 bp, Homo sapiens
tgaggtgtgtttttcttaactactgtaggcagtagatgta

SEQ ID NO: 69997 - DNA, 40 bp, Homo sapiens
tacatctactgcctacagtagttaagaaaaacacacctca

SEQ ID NO: 69998 - DNA, 40 bp, Homo sapiens
gaggtgtgtttttcttaactactgtaggcagtagatgtac

SEQ ID NO: 69999 - DNA, 40 bp, Homo sapiens
gtacatctactgcctacagtagttaagaaaaacacacctc

SEQ ID NO: 70000 - DNA, 40 bp, Homo sapiens
aggtgtgtttttcttaactactgtaggcagtagatgtaca

SEQ ID NO: 70001 - DNA, 40 bp, Homo sapiens
tgtacatctactgcctacagtagttaagaaaaacacacct

SEQ ID NO: 70002 - DNA, 40 bp, Homo sapiens
ggtgtgtttttcttaactactgtaggcagtagatgtacag

SEQ ID NO: 70003 - DNA, 40 bp, Homo sapiens
ctgtacatctactgcctacagtagttaagaaaaacacacc

SEQ ID NO: 70004 - DNA, 40 bp, Homo sapiens
gtgtgtttttcttaactactgtaggcagtagatgtacaga

SEQ ID NO: 70005 - DNA, 40 bp, Homo sapiens
tctgtacatctactgcctacagtagttaagaaaaacacac

SEQ ID NO: 70006 - DNA, 40 bp, Homo sapiens
tgtgtttttcttaactactgtaggcagtagatgtacagat

SEQ ID NO: 70007 - DNA, 40 bp, Homo sapiens
atctgtacatctactgcctacagtagttaagaaaaacaca

SEQ ID NO: 70008 - DNA, 40 bp, Homo sapiens
gtgtttttcttaactactgtaggcagtagatgtacagatg

SEQ ID NO: 70009 - DNA, 40 bp, Homo sapiens
catctgtacatctactgcctacagtagttaagaaaaacac

SEQ ID NO: 70010 - DNA, 40 bp, Homo sapiens
tgtttttcttaactactgtaggcagtagatgtacagatga

SEQ ID NO: 70011 - DNA, 40 bp, Homo sapiens
tcatctgtacatctactgcctacagtagttaagaaaaaca

SEQ ID NO: 70012 - DNA, 40 bp, Homo sapiens
gtttttcttaactactgtaggcagtagatgtacagatgac

SEQ ID NO: 70013 - DNA, 40 bp, Homo sapiens
gtcatctgtacatctactgcctacagtagttaagaaaaac

SEQ ID NO: 70014 - DNA, 40 bp, Homo sapiens
tttttcttaactactgtaggcagtagatgtacagatgact

SEQ ID NO: 70015 - DNA, 40 bp, Homo sapiens
agtcatctgtacatctactgcctacagtagttaagaaaaa

SEQ ID NO: 70016 - DNA, 40 bp, Homo sapiens
ttttcttaactactgtaggcagtagatgtacagatgactt

SEQ ID NO: 70017 - DNA, 40 bp, Homo sapiens
aagtcatctgtacatctactgcctacagtagttaagaaaa

SEQ ID NO: 70018 - DNA, 40 bp, Homo sapiens
tttcttaactactgtaggcagtagatgtacagatgacttc

SEQ ID NO: 70019 - DNA, 40 bp, Homo sapiens
gaagtcatctgtacatctactgcctacagtagttaagaaa

SEQ ID NO: 70020 - DNA, 40 bp, Homo sapiens
ttcttaactactgtaggcagtagatgtacagatgacttct

SEQ ID NO: 70021 - DNA, 40 bp, Homo sapiens
agaagtcatctgtacatctactgcctacagtagttaagaa

SEQ ID NO: 70022 - DNA, 40 bp, Homo sapiens
tcttaactactgtaggcagtagatgtacagatgacttctg

SEQ ID NO: 70023 - DNA, 40 bp, Homo sapiens
cagaagtcatctgtacatctactgcctacagtagttaaga

SEQ ID NO: 70024 - DNA, 40 bp, Homo sapiens
cttaactactgtaggcagtagatgtacagatgacttctgc

SEQ ID NO: 70025 - DNA, 40 bp, Homo sapiens
gcagaagtcatctgtacatctactgcctacagtagttaag

SEQ ID NO: 70026 - DNA, 40 bp, Homo sapiens
ttaactactgtaggcagtagatgtacagatgacttctgca

SEQ ID NO: 70027 - DNA, 40 bp, Homo sapiens
tgcagaagtcatctgtacatctactgcctacagtagttaa

SEQ ID NO: 70028 - DNA, 40 bp, Homo sapiens
taactactgtaggcagtagatgtacagatgacttctgcat

SEQ ID NO: 70029 - DNA, 40 bp, Homo sapiens
atgcagaagtcatctgtacatctactgcctacagtagtta

SEQ ID NO: 70030 - DNA, 40 bp, Homo sapiens
aactactgtaggcagtagatgtacagatgacttctgcatg

SEQ ID NO: 70031 - DNA, 40 bp, Homo sapiens
catgcagaagtcatctgtacatctactgcctacagtagtt

SEQ ID NO: 70032 - DNA, 40 bp, Homo sapiens
actactgtaggcagtagatgtacagatgacttctgcatgc

SEQ ID NO: 70033 - DNA, 40 bp, Homo sapiens
gcatgcagaagtcatctgtacatctactgcctacagtagt

SEQ ID NO: 70034 - DNA, 40 bp, Homo sapiens
ctactgtaggcagtagatgtacagatgacttctgcatgca

SEQ ID NO: 70035 - DNA, 40 bp, Homo sapiens
tgcatgcagaagtcatctgtacatctactgcctacagtag

SEQ ID NO: 70036 - DNA, 40 bp, Homo sapiens
tactgtaggcagtagatgtacagatgacttctgcatgcaa

SEQ ID NO: 70037 - DNA, 40 bp, Homo sapiens
ttgcatgcagaagtcatctgtacatctactgcctacagta

SEQ ID NO: 70038 - DNA, 40 bp, Homo sapiens
actgtaggcagtagatgtacagatgacttctgcatgcaaa

SEQ ID NO: 70039 - DNA, 40 bp, Homo sapiens
tttgcatgcagaagtcatctgtacatctactgcctacagt

SEQ ID NO: 70040 - DNA, 40 bp, Homo sapiens
ctgtaggcagtagatgtacagatgacttctgcatgcaaaa

SEQ ID NO: 70041 - DNA, 40 bp, Homo sapiens
ttttgcatgcagaagtcatctgtacatctactgcctacag

SEQ ID NO: 70042 - DNA, 40 bp, Homo sapiens
tgtaggcagtagatgtacagatgacttctgcatgcaaaaa

SEQ ID NO: 70043 - DNA, 40 bp, Homo sapiens
tttttgcatgcagaagtcatctgtacatctactgcctaca

SEQ ID NO: 70044 - DNA, 40 bp, Homo sapiens
gtaggcagtagatgtacagatgacttctgcatgcaaaaat

SEQ ID NO: 70045 - DNA, 40 bp, Homo sapiens
atttttgcatgcagaagtcatctgtacatctactgcctac

SEQ ID NO: 70046 - DNA, 40 bp, Homo sapiens
taggcagtagatgtacagatgacttctgcatgcaaaaatt

SEQ ID NO: 70047 - DNA, 40 bp, Homo sapiens
aatttttgcatgcagaagtcatctgtacatctactgccta

SEQ ID NO: 70048 - DNA, 40 bp, Homo sapiens
aggcagtagatgtacagatgacttctgcatgcaaaaatta

SEQ ID NO: 70049 - DNA, 40 bp, Homo sapiens
taatttttgcatgcagaagtcatctgtacatctactgcct

SEQ ID NO: 70050 - DNA, 40 bp, Homo sapiens
ggcagtagatgtacagatgacttctgcatgcaaaaattaa

SEQ ID NO: 70051 - DNA, 40 bp, Homo sapiens
ttaatttttgcatgcagaagtcatctgtacatctactgcc

SEQ ID NO: 70052 - DNA, 40 bp, Homo sapiens
gcagtagatgtacagatgacttctgcatgcaaaaattaag

SEQ ID NO: 70053 - DNA, 40 bp, Homo sapiens
cttaatttttgcatgcagaagtcatctgtacatctactgc

SEQ ID NO: 70054 - DNA, 40 bp, Homo sapiens
cagtagatgtacagatgacttctgcatgcaaaaattaagc

SEQ ID NO: 70055 - DNA, 40 bp, Homo sapiens
gcttaatttttgcatgcagaagtcatctgtacatctactg

SEQ ID NO: 70056 - DNA, 40 bp, Homo sapiens
agtagatgtacagatgacttctgcatgcaaaaattaagcc

SEQ ID NO: 70057 - DNA, 40 bp, Homo sapiens
ggcttaatttttgcatgcagaagtcatctgtacatctact

SEQ ID NO: 70058 - DNA, 40 bp, Homo sapiens
gtagatgtacagatgacttctgcatgcaaaaattaagccc

SEQ ID NO: 70059 - DNA, 40 bp, Homo sapiens
gggcttaatttttgcatgcagaagtcatctgtacatctac

SEQ ID NO: 70060 - DNA, 40 bp, Homo sapiens
tagatgtacagatgacttctgcatgcaaaaattaagccct

SEQ ID NO: 70061 - DNA, 40 bp, Homo sapiens
agggcttaatttttgcatgcagaagtcatctgtacatcta

SEQ ID NO: 70062 - DNA, 40 bp, Homo sapiens
agatgtacagatgacttctgcatgcaaaaattaagcccta

SEQ ID NO: 70063 - DNA, 40 bp, Homo sapiens
tagggcttaatttttgcatgcagaagtcatctgtacatct

SEQ ID NO: 70064 - DNA, 40 bp, Homo sapiens
gatgtacagatgacttctgcatgcaaaaattaagccctag

SEQ ID NO: 70065 - DNA, 40 bp, Homo sapiens
ctagggcttaatttttgcatgcagaagtcatctgtacatc

SEQ ID NO: 70066 - DNA, 40 bp, Homo sapiens
atgtacagatgacttctgcatgcaaaaattaagccctagc

SEQ ID NO: 70067 - DNA, 40 bp, Homo sapiens
gctagggcttaatttttgcatgcagaagtcatctgtacat

SEQ ID NO: 70068 - DNA, 40 bp, Homo sapiens
tgtacagatgacttctgcatgcaaaaattaagccctagcc

SEQ ID NO: 70069 - DNA, 40 bp, Homo sapiens
ggctagggcttaatttttgcatgcagaagtcatctgtaca

SEQ ID NO: 70070 - DNA, 40 bp, Homo sapiens
gtacagatgacttctgcatgcaaaaattaagccctagcca

SEQ ID NO: 70071 - DNA, 40 bp, Homo sapiens
tggctagggcttaatttttgcatgcagaagtcatctgtac

SEQ ID NO: 70072 - DNA, 40 bp, Homo sapiens
tacagatgacttctgcatgcaaaaattaagccctagccat

SEQ ID NO: 70073 - DNA, 40 bp, Homo sapiens
atggctagggcttaatttttgcatgcagaagtcatctgta

SEQ ID NO: 70074 - DNA, 40 bp, Homo sapiens
acagatgacttctgcatgcaaaaattaagccctagccatt

SEQ ID NO: 70075 - DNA, 40 bp, Homo sapiens
aatggctagggcttaatttttgcatgcagaagtcatctgt

SEQ ID NO: 70076 - DNA, 40 bp, Homo sapiens
cagatgacttctgcatgcaaaaattaagccctagccattg

SEQ ID NO: 70077 - DNA, 40 bp, Homo sapiens
caatggctagggcttaatttttgcatgcagaagtcatctg

SEQ ID NO: 70078 - DNA, 40 bp, Homo sapiens
agatgacttctgcatgcaaaaattaagccctagccattgg

SEQ ID NO: 70079 - DNA, 40 bp, Homo sapiens
ccaatggctagggcttaatttttgcatgcagaagtcatct

SEQ ID NO: 70080 - DNA, 40 bp, Homo sapiens
gatgacttctgcatgcaaaaattaagccctagccattggt

SEQ ID NO: 70081 - DNA, 40 bp, Homo sapiens
accaatggctagggcttaatttttgcatgcagaagtcatc

SEQ ID NO: 70082 - DNA, 40 bp, Homo sapiens
atgacttctgcatgcaaaaattaagccctagccattggtt

SEQ ID NO: 70083 - DNA, 40 bp, Homo sapiens
aaccaatggctagggcttaatttttgcatgcagaagtcat

SEQ ID NO: 70084 - DNA, 40 bp, Homo sapiens
tgacttctgcatgcaaaaattaagccctagccattggttt

SEQ ID NO: 70085 - DNA, 40 bp, Homo sapiens
aaaccaatggctagggcttaatttttgcatgcagaagtca

SEQ ID NO: 70086 - DNA, 40 bp, Homo sapiens
gacttctgcatgcaaaaattaagccctagccattggttta

SEQ ID NO: 70087 - DNA, 40 bp, Homo sapiens
taaaccaatggctagggcttaatttttgcatgcagaagtc

SEQ ID NO: 70088 - DNA, 40 bp, Homo sapiens
acttctgcatgcaaaaattaagccctagccattggtttac

SEQ ID NO: 70089 - DNA, 40 bp, Homo sapiens
gtaaaccaatggctagggcttaatttttgcatgcagaagt

SEQ ID NO: 70090 - DNA, 40 bp, Homo sapiens
cttctgcatgcaaaaattaagccctagccattggtttact

SEQ ID NO: 70091 - DNA, 40 bp, Homo sapiens
agtaaaccaatggctagggcttaatttttgcatgcagaag

SEQ ID NO: 70092 - DNA, 40 bp, Homo sapiens
ttctgcatgcaaaaattaagccctagccattggtttactt

SEQ ID NO: 70093 - DNA, 40 bp, Homo sapiens
aagtaaaccaatggctagggcttaatttttgcatgcagaa

SEQ ID NO: 70094 - DNA, 40 bp, Homo sapiens
tctgcatgcaaaaattaagccctagccattggtttacttc

SEQ ID NO: 70095 - DNA, 40 bp, Homo sapiens
gaagtaaaccaatggctagggcttaatttttgcatgcaga

SEQ ID NO: 70096 - DNA, 40 bp, Homo sapiens
ctgcatgcaaaaattaagccctagccattggtttacttca

SEQ ID NO: 70097 - DNA, 40 bp, Homo sapiens
tgaagtaaaccaatggctagggcttaatttttgcatgcag

SEQ ID NO: 70098 - DNA, 40 bp, Homo sapiens
tgcatgcaaaaattaagccctagccattggtttacttcaa

SEQ ID NO: 70099 - DNA, 40 bp, Homo sapiens
ttgaagtaaaccaatggctagggcttaatttttgcatgca

SEQ ID NO: 70100 - DNA, 40 bp, Homo sapiens
gcatgcaaaaattaagccctagccattggtttacttcaac

SEQ ID NO: 70101 - DNA, 40 bp, Homo sapiens
gttgaagtaaaccaatggctagggcttaatttttgcatgc

SEQ ID NO: 70102 - DNA, 40 bp, Homo sapiens
catgcaaaaattaagccctagccattggtttacttcaact

SEQ ID NO: 70103 - DNA, 40 bp, Homo sapiens
agttgaagtaaaccaatggctagggcttaatttttgcatg

SEQ ID NO: 70104 - DNA, 40 bp, Homo sapiens
atgcaaaaattaagccctagccattggtttacttcaacta

SEQ ID NO: 70105 - DNA, 40 bp, Homo sapiens
tagttgaagtaaaccaatggctagggcttaatttttgcat

SEQ ID NO: 70106 - DNA, 40 bp, Homo sapiens
tgcaaaaattaagccctagccattggtttacttcaactaa

SEQ ID NO: 70107 - DNA, 40 bp, Homo sapiens
ttagttgaagtaaaccaatggctagggcttaatttttgca

SEQ ID NO: 70108 - DNA, 40 bp, Homo sapiens
gcaaaaattaagccctagccattggtttacttcaactaat

SEQ ID NO: 70109 - DNA, 40 bp, Homo sapiens
attagttgaagtaaaccaatggctagggcttaatttttgc

SEQ ID NO: 70110 - DNA, 40 bp, Homo sapiens
caaaaattaagccctagccattggtttacttcaactaata

SEQ ID NO: 70111 - DNA, 40 bp, Homo sapiens
tattagttgaagtaaaccaatggctagggcttaatttttg

SEQ ID NO: 70112 - DNA, 40 bp, Homo sapiens
aaaaattaagccctagccattggtttacttcaactaatac

SEQ ID NO: 70113 - DNA, 40 bp, Homo sapiens
gtattagttgaagtaaaccaatggctagggcttaattttt

SEQ ID NO: 70114 - DNA, 40 bp, Homo sapiens
aaaattaagccctagccattggtttacttcaactaatact

SEQ ID NO: 70115 - DNA, 40 bp, Homo sapiens
agtattagttgaagtaaaccaatggctagggcttaatttt

SEQ ID NO: 70116 - DNA, 40 bp, Homo sapiens
aaattaagccctagccattggtttacttcaactaatactt

SEQ ID NO: 70117 - DNA, 40 bp, Homo sapiens
aagtattagttgaagtaaaccaatggctagggcttaattt

SEQ ID NO: 70118 - DNA, 40 bp, Homo sapiens
aattaagccctagccattggtttacttcaactaatactta

SEQ ID NO: 70119 - DNA, 40 bp, Homo sapiens
taagtattagttgaagtaaaccaatggctagggcttaatt

SEQ ID NO: 70120 - DNA, 40 bp, Homo sapiens
attaagccctagccattggtttacttcaactaatacttag

SEQ ID NO: 70121 - DNA, 40 bp, Homo sapiens
ctaagtattagttgaagtaaaccaatggctagggcttaat

SEQ ID NO: 70122 - DNA, 40 bp, Homo sapiens
ttaagccctagccattggtttacttcaactaatacttagt

SEQ ID NO: 70123 - DNA, 40 bp, Homo sapiens
actaagtattagttgaagtaaaccaatggctagggcttaa

SEQ ID NO: 70124 - DNA, 40 bp, Homo sapiens
taagccctagccattggtttacttcaactaatacttagtt

SEQ ID NO: 70125 - DNA, 40 bp, Homo sapiens
aactaagtattagttgaagtaaaccaatggctagggctta

SEQ ID NO: 70126 - DNA, 40 bp, Homo sapiens
aagccctagccattggtttacttcaactaatacttagttg

SEQ ID NO: 70127 - DNA, 40 bp, Homo sapiens
caactaagtattagttgaagtaaaccaatggctagggctt

SEQ ID NO: 70128 - DNA, 40 bp, Homo sapiens
agccctagccattggtttacttcaactaatacttagttgc

SEQ ID NO: 70129 - DNA, 40 bp, Homo sapiens
gcaactaagtattagttgaagtaaaccaatggctagggct

SEQ ID NO: 70130 - DNA, 40 bp, Homo sapiens
gccctagccattggtttacttcaactaatacttagttgcc

SEQ ID NO: 70131 - DNA, 40 bp, Homo sapiens
ggcaactaagtattagttgaagtaaaccaatggctagggc

SEQ ID NO: 70132 - DNA, 40 bp, Homo sapiens
ccctagccattggtttacttcaactaatacttagttgcca

SEQ ID NO: 70133 - DNA, 40 bp, Homo sapiens
tggcaactaagtattagttgaagtaaaccaatggctaggg

SEQ ID NO: 70134 - DNA, 40 bp, Homo sapiens
cctagccattggtttacttcaactaatacttagttgccaa

SEQ ID NO: 70135 - DNA, 40 bp, Homo sapiens
ttggcaactaagtattagttgaagtaaaccaatggctagg

SEQ ID NO: 70136 - DNA, 40 bp, Homo sapiens
ctagccattggtttacttcaactaatacttagttgccaat

SEQ ID NO: 70137 - DNA, 40 bp, Homo sapiens
attggcaactaagtattagttgaagtaaaccaatggctag

SEQ ID NO: 70138 - DNA, 40 bp, Homo sapiens
tagccattggtttacttcaactaatacttagttgccaatt

SEQ ID NO: 70139 - DNA, 40 bp, Homo sapiens
aattggcaactaagtattagttgaagtaaaccaatggcta

SEQ ID NO: 70140 - DNA, 40 bp, Homo sapiens
agccattggtttacttcaactaatacttagttgccaattc

SEQ ID NO: 70141 - DNA, 40 bp, Homo sapiens
gaattggcaactaagtattagttgaagtaaaccaatggct

SEQ ID NO: 70142 - DNA, 40 bp, Homo sapiens
gccattggtttacttcaactaatacttagttgccaattct

SEQ ID NO: 70143 - DNA, 40 bp, Homo sapiens
agaattggcaactaagtattagttgaagtaaaccaatggc

SEQ ID NO: 70144 - DNA, 40 bp, Homo sapiens
ccattggtttacttcaactaatacttagttgccaattctc

SEQ ID NO: 70145 - DNA, 40 bp, Homo sapiens
gagaattggcaactaagtattagttgaagtaaaccaatgg

SEQ ID NO: 70146 - DNA, 40 bp, Homo sapiens
cattggtttacttcaactaatacttagttgccaattctct

SEQ ID NO: 70147 - DNA, 40 bp, Homo sapiens
agagaattggcaactaagtattagttgaagtaaaccaatg

SEQ ID NO: 70148 - DNA, 40 bp, Homo sapiens
attggtttacttcaactaatacttagttgccaattctctg

SEQ ID NO: 70149 - DNA, 40 bp, Homo sapiens
cagagaattggcaactaagtattagttgaagtaaaccaat

SEQ ID NO: 70150 - DNA, 40 bp, Homo sapiens
ttggtttacttcaactaatacttagttgccaattctctgt

SEQ ID NO: 70151 - DNA, 40 bp, Homo sapiens
acagagaattggcaactaagtattagttgaagtaaaccaa

SEQ ID NO: 70152 - DNA, 40 bp, Homo sapiens
tggtttacttcaactaatacttagttgccaattctctgtg

SEQ ID NO: 70153 - DNA, 40 bp, Homo sapiens
cacagagaattggcaactaagtattagttgaagtaaacca

SEQ ID NO: 70154 - DNA, 40 bp, Homo sapiens
ggtttacttcaactaatacttagttgccaattctctgtgt

SEQ ID NO: 70155 - DNA, 40 bp, Homo sapiens
acacagagaattggcaactaagtattagttgaagtaaacc

SEQ ID NO: 70156 - DNA, 40 bp, Homo sapiens
gtttacttcaactaatacttagttgccaattctctgtgtg

SEQ ID NO: 70157 - DNA, 40 bp, Homo sapiens
cacacagagaattggcaactaagtattagttgaagtaaac

SEQ ID NO: 70158 - DNA, 40 bp, Homo sapiens
tttacttcaactaatacttagttgccaattctctgtgtgt

SEQ ID NO: 70159 - DNA, 40 bp, Homo sapiens
acacacagagaattggcaactaagtattagttgaagtaaa

SEQ ID NO: 70160 - DNA, 40 bp, Homo sapiens
ttacttcaactaatacttagttgccaattctctgtgtgtg

SEQ ID NO: 70161 - DNA, 40 bp, Homo sapiens
cacacacagagaattggcaactaagtattagttgaagtaa

SEQ ID NO: 70162 - DNA, 40 bp, Homo sapiens
tacttcaactaatacttagttgccaattctctgtgtgtga

SEQ ID NO: 70163 - DNA, 40 bp, Homo sapiens
tcacacacagagaattggcaactaagtattagttgaagta

SEQ ID NO: 70164 - DNA, 40 bp, Homo sapiens
acttcaactaatacttagttgccaattctctgtgtgtgat

SEQ ID NO: 70165 - DNA, 40 bp, Homo sapiens
atcacacacagagaattggcaactaagtattagttgaagt

SEQ ID NO: 70166 - DNA, 40 bp, Homo sapiens
cttcaactaatacttagttgccaattctctgtgtgtgatt

SEQ ID NO: 70167 - DNA, 40 bp, Homo sapiens
aatcacacacagagaattggcaactaagtattagttgaag

SEQ ID NO: 70168 - DNA, 40 bp, Homo sapiens
ttcaactaatacttagttgccaattctctgtgtgtgattg

SEQ ID NO: 70169 - DNA, 40 bp, Homo sapiens
caatcacacacagagaattggcaactaagtattagttgaa

SEQ ID NO: 70170 - DNA, 40 bp, Homo sapiens
tcaactaatacttagttgccaattctctgtgtgtgattga

SEQ ID NO: 70171 - DNA, 40 bp, Homo sapiens
tcaatcacacacagagaattggcaactaagtattagttga

SEQ ID NO: 70172 - DNA, 40 bp, Homo sapiens
caactaatacttagttgccaattctctgtgtgtgattgaa

SEQ ID NO: 70173 - DNA, 40 bp, Homo sapiens
ttcaatcacacacagagaattggcaactaagtattagttg

SEQ ID NO: 70174 - DNA, 40 bp, Homo sapiens
aactaatacttagttgccaattctctgtgtgtgattgaat

SEQ ID NO: 70175 - DNA, 40 bp, Homo sapiens
attcaatcacacacagagaattggcaactaagtattagtt

SEQ ID NO: 70176 - DNA, 40 bp, Homo sapiens
actaatacttagttgccaattctctgtgtgtgattgaatt

SEQ ID NO: 70177 - DNA, 40 bp, Homo sapiens
aattcaatcacacacagagaattggcaactaagtattagt

SEQ ID NO: 70178 - DNA, 40 bp, Homo sapiens
ctaatacttagttgccaattctctgtgtgtgattgaattt

SEQ ID NO: 70179 - DNA, 40 bp, Homo sapiens
aaattcaatcacacacagagaattggcaactaagtattag

SEQ ID NO: 70180 - DNA, 40 bp, Homo sapiens
taatacttagttgccaattctctgtgtgtgattgaattta

SEQ ID NO: 70181 - DNA, 40 bp, Homo sapiens
taaattcaatcacacacagagaattggcaactaagtatta

SEQ ID NO: 70182 - DNA, 40 bp, Homo sapiens
aatacttagttgccaattctctgtgtgtgattgaatttaa

SEQ ID NO: 70183 - DNA, 40 bp, Homo sapiens
ttaaattcaatcacacacagagaattggcaactaagtatt

SEQ ID NO: 70184 - DNA, 40 bp, Homo sapiens
atacttagttgccaattctctgtgtgtgattgaatttaaa

SEQ ID NO: 70185 - DNA, 40 bp, Homo sapiens
tttaaattcaatcacacacagagaattggcaactaagtat

SEQ ID NO: 70186 - DNA, 40 bp, Homo sapiens
tacttagttgccaattctctgtgtgtgattgaatttaaaa

SEQ ID NO: 70187 - DNA, 40 bp, Homo sapiens
ttttaaattcaatcacacacagagaattggcaactaagta

SEQ ID NO: 70188 - DNA, 40 bp, Homo sapiens
acttagttgccaattctctgtgtgtgattgaatttaaaac

SEQ ID NO: 70189 - DNA, 40 bp, Homo sapiens
gttttaaattcaatcacacacagagaattggcaactaagt

SEQ ID NO: 70190 - DNA, 40 bp, Homo sapiens
cttagttgccaattctctgtgtgtgattgaatttaaaact

SEQ ID NO: 70191 - DNA, 40 bp, Homo sapiens
agttttaaattcaatcacacacagagaattggcaactaag

SEQ ID NO: 70192 - DNA, 40 bp, Homo sapiens
ttagttgccaattctctgtgtgtgattgaatttaaaactg

SEQ ID NO: 70193 - DNA, 40 bp, Homo sapiens
cagttttaaattcaatcacacacagagaattggcaactaa

SEQ ID NO: 70194 - DNA, 40 bp, Homo sapiens
tagttgccaattctctgtgtgtgattgaatttaaaactgc

SEQ ID NO: 70195 - DNA, 40 bp, Homo sapiens
gcagttttaaattcaatcacacacagagaattggcaacta

SEQ ID NO: 70196 - DNA, 40 bp, Homo sapiens
agttgccaattctctgtgtgtgattgaatttaaaactgca

SEQ ID NO: 70197 - DNA, 40 bp, Homo sapiens
tgcagttttaaattcaatcacacacagagaattggcaact

SEQ ID NO: 70198 - DNA, 40 bp, Homo sapiens
gttgccaattctctgtgtgtgattgaatttaaaactgcaa

SEQ ID NO: 70199 - DNA, 40 bp, Homo sapiens
ttgcagttttaaattcaatcacacacagagaattggcaac

SEQ ID NO: 70200 - DNA, 40 bp, Homo sapiens
ttgccaattctctgtgtgtgattgaatttaaaactgcaaa

SEQ ID NO: 70201 - DNA, 40 bp, Homo sapiens
tttgcagttttaaattcaatcacacacagagaattggcaa

SEQ ID NO: 70202 - DNA, 40 bp, Homo sapiens
tgccaattctctgtgtgtgattgaatttaaaactgcaaat

SEQ ID NO: 70203 - DNA, 40 bp, Homo sapiens
atttgcagttttaaattcaatcacacacagagaattggca

SEQ ID NO: 70204 - DNA, 40 bp, Homo sapiens
gccaattctctgtgtgtgattgaatttaaaactgcaaatg

SEQ ID NO: 70205 - DNA, 40 bp, Homo sapiens
catttgcagttttaaattcaatcacacacagagaattggc

SEQ ID NO: 70206 - DNA, 40 bp, Homo sapiens
ccaattctctgtgtgtgattgaatttaaaactgcaaatgg

SEQ ID NO: 70207 - DNA, 40 bp, Homo sapiens
ccatttgcagttttaaattcaatcacacacagagaattgg

SEQ ID NO: 70208 - DNA, 40 bp, Homo sapiens
caattctctgtgtgtgattgaatttaaaactgcaaatggt

SEQ ID NO: 70209 - DNA, 40 bp, Homo sapiens
accatttgcagttttaaattcaatcacacacagagaattg

SEQ ID NO: 70210 - DNA, 40 bp, Homo sapiens
aattctctgtgtgtgattgaatttaaaactgcaaatggta

SEQ ID NO: 70211 - DNA, 40 bp, Homo sapiens
taccatttgcagttttaaattcaatcacacacagagaatt

SEQ ID NO: 70212 - DNA, 40 bp, Homo sapiens
attctctgtgtgtgattgaatttaaaactgcaaatggtac

SEQ ID NO: 70213 - DNA, 40 bp, Homo sapiens
gtaccatttgcagttttaaattcaatcacacacagagaat

SEQ ID NO: 70214 - DNA, 40 bp, Homo sapiens
ttctctgtgtgtgattgaatttaaaactgcaaatggtact

SEQ ID NO: 70215 - DNA, 40 bp, Homo sapiens
agtaccatttgcagttttaaattcaatcacacacagagaa

SEQ ID NO: 70216 - DNA, 40 bp, Homo sapiens
tctctgtgtgtgattgaatttaaaactgcaaatggtactg

SEQ ID NO: 70217 - DNA, 40 bp, Homo sapiens
cagtaccatttgcagttttaaattcaatcacacacagaga

SEQ ID NO: 70218 - DNA, 40 bp, Homo sapiens
ctctgtgtgtgattgaatttaaaactgcaaatggtactgg

SEQ ID NO: 70219 - DNA, 40 bp, Homo sapiens
ccagtaccatttgcagttttaaattcaatcacacacagag

SEQ ID NO: 70220 - DNA, 40 bp, Homo sapiens
tctgtgtgtgattgaatttaaaactgcaaatggtactggt

SEQ ID NO: 70221 - DNA, 40 bp, Homo sapiens
accagtaccatttgcagttttaaattcaatcacacacaga

SEQ ID NO: 70222 - DNA, 40 bp, Homo sapiens
ctgtgtgtgattgaatttaaaactgcaaatggtactggtg

SEQ ID NO: 70223 - DNA, 40 bp, Homo sapiens
caccagtaccatttgcagttttaaattcaatcacacacag

SEQ ID NO: 70224 - DNA, 40 bp, Homo sapiens
tgtgtgtgattgaatttaaaactgcaaatggtactggtga

SEQ ID NO: 70225 - DNA, 40 bp, Homo sapiens
tcaccagtaccatttgcagttttaaattcaatcacacaca

SEQ ID NO: 70226 - DNA, 40 bp, Homo sapiens
gtgtgtgattgaatttaaaactgcaaatggtactggtgat

SEQ ID NO: 70227 - DNA, 40 bp, Homo sapiens
atcaccagtaccatttgcagttttaaattcaatcacacac

SEQ ID NO: 70228 - DNA, 40 bp, Homo sapiens
tgtgtgattgaatttaaaactgcaaatggtactggtgata

SEQ ID NO: 70229 - DNA, 40 bp, Homo sapiens
tatcaccagtaccatttgcagttttaaattcaatcacaca

SEQ ID NO: 70230 - DNA, 40 bp, Homo sapiens
gtgtgattgaatttaaaactgcaaatggtactggtgatac

SEQ ID NO: 70231 - DNA, 40 bp, Homo sapiens
gtatcaccagtaccatttgcagttttaaattcaatcacac

SEQ ID NO: 70232 - DNA, 40 bp, Homo sapiens
tgtgattgaatttaaaactgcaaatggtactggtgataca

SEQ ID NO: 70233 - DNA, 40 bp, Homo sapiens
tgtatcaccagtaccatttgcagttttaaattcaatcaca

SEQ ID NO: 70234 - DNA, 40 bp, Homo sapiens
gtgattgaatttaaaactgcaaatggtactggtgatacat

SEQ ID NO: 70235 - DNA, 40 bp, Homo sapiens
atgtatcaccagtaccatttgcagttttaaattcaatcac

SEQ ID NO: 70236 - DNA, 40 bp, Homo sapiens
tgattgaatttaaaactgcaaatggtactggtgatacatt

SEQ ID NO: 70237 - DNA, 40 bp, Homo sapiens
aatgtatcaccagtaccatttgcagttttaaattcaatca

SEQ ID NO: 70238 - DNA, 40 bp, Homo sapiens
gattgaatttaaaactgcaaatggtactggtgatacatta

SEQ ID NO: 70239 - DNA, 40 bp, Homo sapiens
taatgtatcaccagtaccatttgcagttttaaattcaatc

SEQ ID NO: 70240 - DNA, 40 bp, Homo sapiens
attgaatttaaaactgcaaatggtactggtgatacattaa

SEQ ID NO: 70241 - DNA, 40 bp, Homo sapiens
ttaatgtatcaccagtaccatttgcagttttaaattcaat

SEQ ID NO: 70242 - DNA, 40 bp, Homo sapiens
ttgaatttaaaactgcaaatggtactggtgatacattaac

SEQ ID NO: 70243 - DNA, 40 bp, Homo sapiens
gttaatgtatcaccagtaccatttgcagttttaaattcaa

SEQ ID NO: 70244 - DNA, 40 bp, Homo sapiens
tgaatttaaaactgcaaatggtactggtgatacattaact

SEQ ID NO: 70245 - DNA, 40 bp, Homo sapiens
agttaatgtatcaccagtaccatttgcagttttaaattca

SEQ ID NO: 70246 - DNA, 40 bp, Homo sapiens
gaatttaaaactgcaaatggtactggtgatacattaactt

SEQ ID NO: 70247 - DNA, 40 bp, Homo sapiens
aagttaatgtatcaccagtaccatttgcagttttaaattc

SEQ ID NO: 70248 - DNA, 40 bp, Homo sapiens
aatttaaaactgcaaatggtactggtgatacattaacttt

SEQ ID NO: 70249 - DNA, 40 bp, Homo sapiens
aaagttaatgtatcaccagtaccatttgcagttttaaatt

SEQ ID NO: 70250 - DNA, 40 bp, Homo sapiens
atttaaaactgcaaatggtactggtgatacattaactttt

SEQ ID NO: 70251 - DNA, 40 bp, Homo sapiens
aaaagttaatgtatcaccagtaccatttgcagttttaaat

SEQ ID NO: 70252 - DNA, 40 bp, Homo sapiens
tttaaaactgcaaatggtactggtgatacattaacttttt

SEQ ID NO: 70253 - DNA, 40 bp, Homo sapiens
aaaaagttaatgtatcaccagtaccatttgcagttttaaa

SEQ ID NO: 70254 - DNA, 40 bp, Homo sapiens
ttaaaactgcaaatggtactggtgatacattaacttttta

SEQ ID NO: 70255 - DNA, 40 bp, Homo sapiens
taaaaagttaatgtatcaccagtaccatttgcagttttaa

SEQ ID NO: 70256 - DNA, 40 bp, Homo sapiens
taaaactgcaaatggtactggtgatacattaactttttag

SEQ ID NO: 70257 - DNA, 40 bp, Homo sapiens
ctaaaaagttaatgtatcaccagtaccatttgcagtttta

SEQ ID NO: 70258 - DNA, 40 bp, Homo sapiens
aaaactgcaaatggtactggtgatacattaactttttagg

SEQ ID NO: 70259 - DNA, 40 bp, Homo sapiens
cctaaaaagttaatgtatcaccagtaccatttgcagtttt

SEQ ID NO: 70260 - DNA, 40 bp, Homo sapiens
aaactgcaaatggtactggtgatacattaactttttaggt

SEQ ID NO: 70261 - DNA, 40 bp, Homo sapiens
acctaaaaagttaatgtatcaccagtaccatttgcagttt

SEQ ID NO: 70262 - DNA, 40 bp, Homo sapiens
aactgcaaatggtactggtgatacattaactttttaggtg

SEQ ID NO: 70263 - DNA, 40 bp, Homo sapiens
cacctaaaaagttaatgtatcaccagtaccatttgcagtt

SEQ ID NO: 70264 - DNA, 40 bp, Homo sapiens
actgcaaatggtactggtgatacattaactttttaggtgc

SEQ ID NO: 70265 - DNA, 40 bp, Homo sapiens
gcacctaaaaagttaatgtatcaccagtaccatttgcagt

SEQ ID NO: 70266 - DNA, 40 bp, Homo sapiens
ctgcaaatggtactggtgatacattaactttttaggtgct

SEQ ID NO: 70267 - DNA, 40 bp, Homo sapiens
agcacctaaaaagttaatgtatcaccagtaccatttgcag

SEQ ID NO: 70268 - DNA, 40 bp, Homo sapiens
tgcaaatggtactggtgatacattaactttttaggtgcta

SEQ ID NO: 70269 - DNA, 40 bp, Homo sapiens
tagcacctaaaaagttaatgtatcaccagtaccatttgca

SEQ ID NO: 70270 - DNA, 40 bp, Homo sapiens
gcaaatggtactggtgatacattaactttttaggtgctag

SEQ ID NO: 70271 - DNA, 40 bp, Homo sapiens
ctagcacctaaaaagttaatgtatcaccagtaccatttgc

SEQ ID NO: 70272 - DNA, 40 bp, Homo sapiens
caaatggtactggtgatacattaactttttaggtgctagg

SEQ ID NO: 70273 - DNA, 40 bp, Homo sapiens
cctagcacctaaaaagttaatgtatcaccagtaccatttg

SEQ ID NO: 70274 - DNA, 40 bp, Homo sapiens
aaatggtactggtgatacattaactttttaggtgctaggt

SEQ ID NO: 70275 - DNA, 40 bp, Homo sapiens
acctagcacctaaaaagttaatgtatcaccagtaccattt

SEQ ID NO: 70276 - DNA, 40 bp, Homo sapiens
aatggtactggtgatacattaactttttaggtgctaggtc

SEQ ID NO: 70277 - DNA, 40 bp, Homo sapiens
gacctagcacctaaaaagttaatgtatcaccagtaccatt

SEQ ID NO: 70278 - DNA, 40 bp, Homo sapiens
atggtactggtgatacattaactttttaggtgctaggtcc

SEQ ID NO: 70279 - DNA, 40 bp, Homo sapiens
ggacctagcacctaaaaagttaatgtatcaccagtaccat

SEQ ID NO: 70280 - DNA, 40 bp, Homo sapiens
tggtactggtgatacattaactttttaggtgctaggtcca

SEQ ID NO: 70281 - DNA, 40 bp, Homo sapiens
tggacctagcacctaaaaagttaatgtatcaccagtacca

SEQ ID NO: 70282 - DNA, 40 bp, Homo sapiens
ggtactggtgatacattaactttttaggtgctaggtccac

SEQ ID NO: 70283 - DNA, 40 bp, Homo sapiens
gtggacctagcacctaaaaagttaatgtatcaccagtacc

SEQ ID NO: 70284 - DNA, 40 bp, Homo sapiens
gtactggtgatacattaactttttaggtgctaggtccact

SEQ ID NO: 70285 - DNA, 40 bp, Homo sapiens
agtggacctagcacctaaaaagttaatgtatcaccagtac

SEQ ID NO: 70286 - DNA, 40 bp, Homo sapiens
tactggtgatacattaactttttaggtgctaggtccactt

SEQ ID NO: 70287 - DNA, 40 bp, Homo sapiens
aagtggacctagcacctaaaaagttaatgtatcaccagta

SEQ ID NO: 70288 - DNA, 40 bp, Homo sapiens
actggtgatacattaactttttaggtgctaggtccacttt

SEQ ID NO: 70289 - DNA, 40 bp, Homo sapiens
aaagtggacctagcacctaaaaagttaatgtatcaccagt

SEQ ID NO: 70290 - DNA, 40 bp, Homo sapiens
ctggtgatacattaactttttaggtgctaggtccactttg

SEQ ID NO: 70291 - DNA, 40 bp, Homo sapiens
caaagtggacctagcacctaaaaagttaatgtatcaccag

SEQ ID NO: 70292 - DNA, 40 bp, Homo sapiens
tggtgatacattaactttttaggtgctaggtccactttgt

SEQ ID NO: 70293 - DNA, 40 bp, Homo sapiens
acaaagtggacctagcacctaaaaagttaatgtatcacca

SEQ ID NO: 70294 - DNA, 40 bp, Homo sapiens
ggtgatacattaactttttaggtgctaggtccactttgtt

SEQ ID NO: 70295 - DNA, 40 bp, Homo sapiens
aacaaagtggacctagcacctaaaaagttaatgtatcacc

SEQ ID NO: 70296 - DNA, 40 bp, Homo sapiens
gtgatacattaactttttaggtgctaggtccactttgtta

SEQ ID NO: 70297 - DNA, 40 bp, Homo sapiens
taacaaagtggacctagcacctaaaaagttaatgtatcac

SEQ ID NO: 70298 - DNA, 40 bp, Homo sapiens
tgatacattaactttttaggtgctaggtccactttgttac

SEQ ID NO: 70299 - DNA, 40 bp, Homo sapiens
gtaacaaagtggacctagcacctaaaaagttaatgtatca

SEQ ID NO: 70300 - DNA, 40 bp, Homo sapiens
gatacattaactttttaggtgctaggtccactttgttaca

SEQ ID NO: 70301 - DNA, 40 bp, Homo sapiens
tgtaacaaagtggacctagcacctaaaaagttaatgtatc

SEQ ID NO: 70302 - DNA, 40 bp, Homo sapiens
atacattaactttttaggtgctaggtccactttgttacat

SEQ ID NO: 70303 - DNA, 40 bp, Homo sapiens
atgtaacaaagtggacctagcacctaaaaagttaatgtat

SEQ ID NO: 70304 - DNA, 40 bp, Homo sapiens
tacattaactttttaggtgctaggtccactttgttacatt

SEQ ID NO: 70305 - DNA, 40 bp, Homo sapiens
aatgtaacaaagtggacctagcacctaaaaagttaatgta

SEQ ID NO: 70306 - DNA, 40 bp, Homo sapiens
acattaactttttaggtgctaggtccactttgttacattt

SEQ ID NO: 70307 - DNA, 40 bp, Homo sapiens
aaatgtaacaaagtggacctagcacctaaaaagttaatgt

SEQ ID NO: 70308 - DNA, 40 bp, Homo sapiens
cattaactttttaggtgctaggtccactttgttacatttg

SEQ ID NO: 70309 - DNA, 40 bp, Homo sapiens
caaatgtaacaaagtggacctagcacctaaaaagttaatg

SEQ ID NO: 70310 - DNA, 40 bp, Homo sapiens
attaactttttaggtgctaggtccactttgttacatttgg

SEQ ID NO: 70311 - DNA, 40 bp, Homo sapiens
ccaaatgtaacaaagtggacctagcacctaaaaagttaat

SEQ ID NO: 70312 - DNA, 40 bp, Homo sapiens
ttaactttttaggtgctaggtccactttgttacatttggt

SEQ ID NO: 70313 - DNA, 40 bp, Homo sapiens
accaaatgtaacaaagtggacctagcacctaaaaagttaa

SEQ ID NO: 70314 - DNA, 40 bp, Homo sapiens
taactttttaggtgctaggtccactttgttacatttggtt

SEQ ID NO: 70315 - DNA, 40 bp, Homo sapiens
aaccaaatgtaacaaagtggacctagcacctaaaaagtta

SEQ ID NO: 70316 - DNA, 40 bp, Homo sapiens
aactttttaggtgctaggtccactttgttacatttggttc

SEQ ID NO: 70317 - DNA, 40 bp, Homo sapiens
gaaccaaatgtaacaaagtggacctagcacctaaaaagtt

SEQ ID NO: 70318 - DNA, 40 bp, Homo sapiens
actttttaggtgctaggtccactttgttacatttggttca

SEQ ID NO: 70319 - DNA, 40 bp, Homo sapiens
tgaaccaaatgtaacaaagtggacctagcacctaaaaagt

SEQ ID NO: 70320 - DNA, 40 bp, Homo sapiens
ctttttaggtgctaggtccactttgttacatttggttcag

SEQ ID NO: 70321 - DNA, 40 bp, Homo sapiens
ctgaaccaaatgtaacaaagtggacctagcacctaaaaag

SEQ ID NO: 70322 - DNA, 40 bp, Homo sapiens
tttttaggtgctaggtccactttgttacatttggttcagt

SEQ ID NO: 70323 - DNA, 40 bp, Homo sapiens
actgaaccaaatgtaacaaagtggacctagcacctaaaaa

SEQ ID NO: 70324 - DNA, 40 bp, Homo sapiens
ttttaggtgctaggtccactttgttacatttggttcagta

SEQ ID NO: 70325 - DNA, 40 bp, Homo sapiens
tactgaaccaaatgtaacaaagtggacctagcacctaaaa

SEQ ID NO: 70326 - DNA, 40 bp, Homo sapiens
tttaggtgctaggtccactttgttacatttggttcagtag

SEQ ID NO: 70327 - DNA, 40 bp, Homo sapiens
ctactgaaccaaatgtaacaaagtggacctagcacctaaa

SEQ ID NO: 70328 - DNA, 40 bp, Homo sapiens
ttaggtgctaggtccactttgttacatttggttcagtaga

SEQ ID NO: 70329 - DNA, 40 bp, Homo sapiens
tctactgaaccaaatgtaacaaagtggacctagcacctaa

SEQ ID NO: 70330 - DNA, 40 bp, Homo sapiens
taggtgctaggtccactttgttacatttggttcagtagaa

SEQ ID NO: 70331 - DNA, 40 bp, Homo sapiens
ttctactgaaccaaatgtaacaaagtggacctagcaccta

SEQ ID NO: 70332 - DNA, 40 bp, Homo sapiens
aggtgctaggtccactttgttacatttggttcagtagaaa

SEQ ID NO: 70333 - DNA, 40 bp, Homo sapiens
tttctactgaaccaaatgtaacaaagtggacctagcacct

SEQ ID NO: 70334 - DNA, 40 bp, Homo sapiens
ggtgctaggtccactttgttacatttggttcagtagaaac

SEQ ID NO: 70335 - DNA, 40 bp, Homo sapiens
gtttctactgaaccaaatgtaacaaagtggacctagcacc

SEQ ID NO: 70336 - DNA, 40 bp, Homo sapiens
gtgctaggtccactttgttacatttggttcagtagaaaca

SEQ ID NO: 70337 - DNA, 40 bp, Homo sapiens
tgtttctactgaaccaaatgtaacaaagtggacctagcac

SEQ ID NO: 70338 - DNA, 40 bp, Homo sapiens
tgctaggtccactttgttacatttggttcagtagaaacat

SEQ ID NO: 70339 - DNA, 40 bp, Homo sapiens
atgtttctactgaaccaaatgtaacaaagtggacctagca

SEQ ID NO: 70340 - DNA, 40 bp, Homo sapiens
gctaggtccactttgttacatttggttcagtagaaacatt

SEQ ID NO: 70341 - DNA, 40 bp, Homo sapiens
aatgtttctactgaaccaaatgtaacaaagtggacctagc

SEQ ID NO: 70342 - DNA, 40 bp, Homo sapiens
ctaggtccactttgttacatttggttcagtagaaacattg

SEQ ID NO: 70343 - DNA, 40 bp, Homo sapiens
caatgtttctactgaaccaaatgtaacaaagtggacctag

SEQ ID NO: 70344 - DNA, 40 bp, Homo sapiens
taggtccactttgttacatttggttcagtagaaacattga

SEQ ID NO: 70345 - DNA, 40 bp, Homo sapiens
tcaatgtttctactgaaccaaatgtaacaaagtggaccta

SEQ ID NO: 70346 - DNA, 40 bp, Homo sapiens
aggtccactttgttacatttggttcagtagaaacattgat

SEQ ID NO: 70347 - DNA, 40 bp, Homo sapiens
atcaatgtttctactgaaccaaatgtaacaaagtggacct

SEQ ID NO: 70348 - DNA, 40 bp, Homo sapiens
ggtccactttgttacatttggttcagtagaaacattgatg

SEQ ID NO: 70349 - DNA, 40 bp, Homo sapiens
catcaatgtttctactgaaccaaatgtaacaaagtggacc

SEQ ID NO: 70350 - DNA, 40 bp, Homo sapiens
gtccactttgttacatttggttcagtagaaacattgatgt

SEQ ID NO: 70351 - DNA, 40 bp, Homo sapiens
acatcaatgtttctactgaaccaaatgtaacaaagtggac

SEQ ID NO: 70352 - DNA, 40 bp, Homo sapiens
tccactttgttacatttggttcagtagaaacattgatgtt

SEQ ID NO: 70353 - DNA, 40 bp, Homo sapiens
aacatcaatgtttctactgaaccaaatgtaacaaagtgga

SEQ ID NO: 70354 - DNA, 40 bp, Homo sapiens
ccactttgttacatttggttcagtagaaacattgatgtta

SEQ ID NO: 70355 - DNA, 40 bp, Homo sapiens
taacatcaatgtttctactgaaccaaatgtaacaaagtgg

SEQ ID NO: 70356 - DNA, 40 bp, Homo sapiens
cactttgttacatttggttcagtagaaacattgatgttac

SEQ ID NO: 70357 - DNA, 40 bp, Homo sapiens
gtaacatcaatgtttctactgaaccaaatgtaacaaagtg

SEQ ID NO: 70358 - DNA, 40 bp, Homo sapiens
actttgttacatttggttcagtagaaacattgatgttacc

SEQ ID NO: 70359 - DNA, 40 bp, Homo sapiens
ggtaacatcaatgtttctactgaaccaaatgtaacaaagt

SEQ ID NO: 70360 - DNA, 40 bp, Homo sapiens
ctttgttacatttggttcagtagaaacattgatgttacca

SEQ ID NO: 70361 - DNA, 40 bp, Homo sapiens
tggtaacatcaatgtttctactgaaccaaatgtaacaaag

SEQ ID NO: 70362 - DNA, 40 bp, Homo sapiens
tttgttacatttggttcagtagaaacattgatgttaccaa

SEQ ID NO: 70363 - DNA, 40 bp, Homo sapiens
ttggtaacatcaatgtttctactgaaccaaatgtaacaaa

SEQ ID NO: 70364 - DNA, 40 bp, Homo sapiens
ttgttacatttggttcagtagaaacattgatgttaccaat

SEQ ID NO: 70365 - DNA, 40 bp, Homo sapiens
attggtaacatcaatgtttctactgaaccaaatgtaacaa

SEQ ID NO: 70366 - DNA, 40 bp, Homo sapiens
tgttacatttggttcagtagaaacattgatgttaccaatc

SEQ ID NO: 70367 - DNA, 40 bp, Homo sapiens
gattggtaacatcaatgtttctactgaaccaaatgtaaca

SEQ ID NO: 70368 - DNA, 40 bp, Homo sapiens
gttacatttggttcagtagaaacattgatgttaccaatct

SEQ ID NO: 70369 - DNA, 40 bp, Homo sapiens
agattggtaacatcaatgtttctactgaaccaaatgtaac

SEQ ID NO: 70370 - DNA, 40 bp, Homo sapiens
ttacatttggttcagtagaaacattgatgttaccaatctc

SEQ ID NO: 70371 - DNA, 40 bp, Homo sapiens
gagattggtaacatcaatgtttctactgaaccaaatgtaa

SEQ ID NO: 70372 - DNA, 40 bp, Homo sapiens
tacatttggttcagtagaaacattgatgttaccaatctca

SEQ ID NO: 70373 - DNA, 40 bp, Homo sapiens
tgagattggtaacatcaatgtttctactgaaccaaatgta

SEQ ID NO: 70374 - DNA, 40 bp, Homo sapiens
acatttggttcagtagaaacattgatgttaccaatctcag

SEQ ID NO: 70375 - DNA, 40 bp, Homo sapiens
ctgagattggtaacatcaatgtttctactgaaccaaatgt

SEQ ID NO: 70376 - DNA, 40 bp, Homo sapiens
catttggttcagtagaaacattgatgttaccaatctcaga

SEQ ID NO: 70377 - DNA, 40 bp, Homo sapiens
tctgagattggtaacatcaatgtttctactgaaccaaatg

SEQ ID NO: 70378 - DNA, 40 bp, Homo sapiens
atttggttcagtagaaacattgatgttaccaatctcagaa

SEQ ID NO: 70379 - DNA, 40 bp, Homo sapiens
ttctgagattggtaacatcaatgtttctactgaaccaaat

SEQ ID NO: 70380 - DNA, 40 bp, Homo sapiens
tttggttcagtagaaacattgatgttaccaatctcagaaa

SEQ ID NO: 70381 - DNA, 40 bp, Homo sapiens
tttctgagattggtaacatcaatgtttctactgaaccaaa

SEQ ID NO: 70382 - DNA, 40 bp, Homo sapiens
ttggttcagtagaaacattgatgttaccaatctcagaaag

SEQ ID NO: 70383 - DNA, 40 bp, Homo sapiens
ctttctgagattggtaacatcaatgtttctactgaaccaa

SEQ ID NO: 70384 - DNA, 40 bp, Homo sapiens
tggttcagtagaaacattgatgttaccaatctcagaaagc

SEQ ID NO: 70385 - DNA, 40 bp, Homo sapiens
gctttctgagattggtaacatcaatgtttctactgaacca

SEQ ID NO: 70386 - DNA, 40 bp, Homo sapiens
ggttcagtagaaacattgatgttaccaatctcagaaagct

SEQ ID NO: 70387 - DNA, 40 bp, Homo sapiens
agctttctgagattggtaacatcaatgtttctactgaacc

SEQ ID NO: 70388 - DNA, 40 bp, Homo sapiens
gttcagtagaaacattgatgttaccaatctcagaaagcta

SEQ ID NO: 70389 - DNA, 40 bp, Homo sapiens
tagctttctgagattggtaacatcaatgtttctactgaac

SEQ ID NO: 70390 - DNA, 40 bp, Homo sapiens
ttcagtagaaacattgatgttaccaatctcagaaagctaa

SEQ ID NO: 70391 - DNA, 40 bp, Homo sapiens
ttagctttctgagattggtaacatcaatgtttctactgaa

SEQ ID NO: 70392 - DNA, 40 bp, Homo sapiens
tcagtagaaacattgatgttaccaatctcagaaagctaaa

SEQ ID NO: 70393 - DNA, 40 bp, Homo sapiens
tttagctttctgagattggtaacatcaatgtttctactga

SEQ ID NO: 70394 - DNA, 40 bp, Homo sapiens
cagtagaaacattgatgttaccaatctcagaaagctaaaa

SEQ ID NO: 70395 - DNA, 40 bp, Homo sapiens
ttttagctttctgagattggtaacatcaatgtttctactg

SEQ ID NO: 70396 - DNA, 40 bp, Homo sapiens
agtagaaacattgatgttaccaatctcagaaagctaaaat

SEQ ID NO: 70397 - DNA, 40 bp, Homo sapiens
attttagctttctgagattggtaacatcaatgtttctact

SEQ ID NO: 70398 - DNA, 40 bp, Homo sapiens
gtagaaacattgatgttaccaatctcagaaagctaaaata

SEQ ID NO: 70399 - DNA, 40 bp, Homo sapiens
tattttagctttctgagattggtaacatcaatgtttctac

SEQ ID NO: 70400 - DNA, 40 bp, Homo sapiens
tagaaacattgatgttaccaatctcagaaagctaaaatat

SEQ ID NO: 70401 - DNA, 40 bp, Homo sapiens
atattttagctttctgagattggtaacatcaatgtttcta

SEQ ID NO: 70402 - DNA, 40 bp, Homo sapiens
agaaacattgatgttaccaatctcagaaagctaaaatatg

SEQ ID NO: 70403 - DNA, 40 bp, Homo sapiens
catattttagctttctgagattggtaacatcaatgtttct

SEQ ID NO: 70404 - DNA, 40 bp, Homo sapiens
gaaacattgatgttaccaatctcagaaagctaaaatatgt

SEQ ID NO: 70405 - DNA, 40 bp, Homo sapiens
acatattttagctttctgagattggtaacatcaatgtttc

SEQ ID NO: 70406 - DNA, 40 bp, Homo sapiens
aaacattgatgttaccaatctcagaaagctaaaatatgta

SEQ ID NO: 70407 - DNA, 40 bp, Homo sapiens
tacatattttagctttctgagattggtaacatcaatgttt

SEQ ID NO: 70408 - DNA, 40 bp, Homo sapiens
aacattgatgttaccaatctcagaaagctaaaatatgtat

SEQ ID NO: 70409 - DNA, 40 bp, Homo sapiens
atacatattttagctttctgagattggtaacatcaatgtt

SEQ ID NO: 70410 - DNA, 40 bp, Homo sapiens
acattgatgttaccaatctcagaaagctaaaatatgtatg

SEQ ID NO: 70411 - DNA, 40 bp, Homo sapiens
catacatattttagctttctgagattggtaacatcaatgt

SEQ ID NO: 70412 - DNA, 40 bp, Homo sapiens
cattgatgttaccaatctcagaaagctaaaatatgtatgc

SEQ ID NO: 70413 - DNA, 40 bp, Homo sapiens
gcatacatattttagctttctgagattggtaacatcaatg

SEQ ID NO: 70414 - DNA, 40 bp, Homo sapiens
attgatgttaccaatctcagaaagctaaaatatgtatgcc

SEQ ID NO: 70415 - DNA, 40 bp, Homo sapiens
ggcatacatattttagctttctgagattggtaacatcaat

SEQ ID NO: 70416 - DNA, 40 bp, Homo sapiens
ttgatgttaccaatctcagaaagctaaaatatgtatgcca

SEQ ID NO: 70417 - DNA, 40 bp, Homo sapiens
tggcatacatattttagctttctgagattggtaacatcaa

SEQ ID NO: 70418 - DNA, 40 bp, Homo sapiens
tgatgttaccaatctcagaaagctaaaatatgtatgccaa

SEQ ID NO: 70419 - DNA, 40 bp, Homo sapiens
ttggcatacatattttagctttctgagattggtaacatca

SEQ ID NO: 70420 - DNA, 40 bp, Homo sapiens
gatgttaccaatctcagaaagctaaaatatgtatgccaat

SEQ ID NO: 70421 - DNA, 40 bp, Homo sapiens
attggcatacatattttagctttctgagattggtaacatc

SEQ ID NO: 70422 - DNA, 40 bp, Homo sapiens
atgttaccaatctcagaaagctaaaatatgtatgccaatc

SEQ ID NO: 70423 - DNA, 40 bp, Homo sapiens
gattggcatacatattttagctttctgagattggtaacat

SEQ ID NO: 70424 - DNA, 40 bp, Homo sapiens
tgttaccaatctcagaaagctaaaatatgtatgccaatcc

SEQ ID NO: 70425 - DNA, 40 bp, Homo sapiens
ggattggcatacatattttagctttctgagattggtaaca

SEQ ID NO: 70426 - DNA, 40 bp, Homo sapiens
gttaccaatctcagaaagctaaaatatgtatgccaatccc

SEQ ID NO: 70427 - DNA, 40 bp, Homo sapiens
gggattggcatacatattttagctttctgagattggtaac

SEQ ID NO: 70428 - DNA, 40 bp, Homo sapiens
ttaccaatctcagaaagctaaaatatgtatgccaatcccc

SEQ ID NO: 70429 - DNA, 40 bp, Homo sapiens
ggggattggcatacatattttagctttctgagattggtaa

SEQ ID NO: 70430 - DNA, 40 bp, Homo sapiens
taccaatctcagaaagctaaaatatgtatgccaatcccca

SEQ ID NO: 70431 - DNA, 40 bp, Homo sapiens
tggggattggcatacatattttagctttctgagattggta

SEQ ID NO: 70432 - DNA, 40 bp, Homo sapiens
accaatctcagaaagctaaaatatgtatgccaatccccaa

SEQ ID NO: 70433 - DNA, 40 bp, Homo sapiens
ttggggattggcatacatattttagctttctgagattggt

SEQ ID NO: 70434 - DNA, 40 bp, Homo sapiens
ccaatctcagaaagctaaaatatgtatgccaatccccaaa

SEQ ID NO: 70435 - DNA, 40 bp, Homo sapiens
tttggggattggcatacatattttagctttctgagattgg

SEQ ID NO: 70436 - DNA, 40 bp, Homo sapiens
caatctcagaaagctaaaatatgtatgccaatccccaaat

SEQ ID NO: 70437 - DNA, 40 bp, Homo sapiens
atttggggattggcatacatattttagctttctgagattg

SEQ ID NO: 70438 - DNA, 40 bp, Homo sapiens
aatctcagaaagctaaaatatgtatgccaatccccaaatt

SEQ ID NO: 70439 - DNA, 40 bp, Homo sapiens
aatttggggattggcatacatattttagctttctgagatt

SEQ ID NO: 70440 - DNA, 40 bp, Homo sapiens
atctcagaaagctaaaatatgtatgccaatccccaaatta

SEQ ID NO: 70441 - DNA, 40 bp, Homo sapiens
taatttggggattggcatacatattttagctttctgagat

SEQ ID NO: 70442 - DNA, 40 bp, Homo sapiens
tctcagaaagctaaaatatgtatgccaatccccaaattag

SEQ ID NO: 70443 - DNA, 40 bp, Homo sapiens
ctaatttggggattggcatacatattttagctttctgaga

SEQ ID NO: 70444 - DNA, 40 bp, Homo sapiens
ctcagaaagctaaaatatgtatgccaatccccaaattagg

SEQ ID NO: 70445 - DNA, 40 bp, Homo sapiens
cctaatttggggattggcatacatattttagctttctgag

SEQ ID NO: 70446 - DNA, 40 bp, Homo sapiens
tcagaaagctaaaatatgtatgccaatccccaaattaggt

SEQ ID NO: 70447 - DNA, 40 bp, Homo sapiens
acctaatttggggattggcatacatattttagctttctga

SEQ ID NO: 70448 - DNA, 40 bp, Homo sapiens
cagaaagctaaaatatgtatgccaatccccaaattaggta

SEQ ID NO: 70449 - DNA, 40 bp, Homo sapiens
tacctaatttggggattggcatacatattttagctttctg

SEQ ID NO: 70450 - DNA, 40 bp, Homo sapiens
agaaagctaaaatatgtatgccaatccccaaattaggtaa

SEQ ID NO: 70451 - DNA, 40 bp, Homo sapiens
ttacctaatttggggattggcatacatattttagctttct

SEQ ID NO: 70452 - DNA, 40 bp, Homo sapiens
gaaagctaaaatatgtatgccaatccccaaattaggtaat

SEQ ID NO: 70453 - DNA, 40 bp, Homo sapiens
attacctaatttggggattggcatacatattttagctttc

SEQ ID NO: 70454 - DNA, 40 bp, Homo sapiens
aaagctaaaatatgtatgccaatccccaaattaggtaatt

SEQ ID NO: 70455 - DNA, 40 bp, Homo sapiens
aattacctaatttggggattggcatacatattttagcttt

SEQ ID NO: 70456 - DNA, 40 bp, Homo sapiens
aagctaaaatatgtatgccaatccccaaattaggtaattt

SEQ ID NO: 70457 - DNA, 40 bp, Homo sapiens
aaattacctaatttggggattggcatacatattttagctt

SEQ ID NO: 70458 - DNA, 40 bp, Homo sapiens
agctaaaatatgtatgccaatccccaaattaggtaattta

SEQ ID NO: 70459 - DNA, 40 bp, Homo sapiens
taaattacctaatttggggattggcatacatattttagct

SEQ ID NO: 70460 - DNA, 40 bp, Homo sapiens
gctaaaatatgtatgccaatccccaaattaggtaatttat

SEQ ID NO: 70461 - DNA, 40 bp, Homo sapiens
ataaattacctaatttggggattggcatacatattttagc

SEQ ID NO: 70462 - DNA, 40 bp, Homo sapiens
ctaaaatatgtatgccaatccccaaattaggtaatttatt

SEQ ID NO: 70463 - DNA, 40 bp, Homo sapiens
aataaattacctaatttggggattggcatacatattttag

SEQ ID NO: 70464 - DNA, 40 bp, Homo sapiens
taaaatatgtatgccaatccccaaattaggtaatttattc

SEQ ID NO: 70465 - DNA, 40 bp, Homo sapiens
gaataaattacctaatttggggattggcatacatatttta

SEQ ID NO: 70466 - DNA, 40 bp, Homo sapiens
aaaatatgtatgccaatccccaaattaggtaatttattct

SEQ ID NO: 70467 - DNA, 40 bp, Homo sapiens
agaataaattacctaatttggggattggcatacatatttt

SEQ ID NO: 70468 - DNA, 40 bp, Homo sapiens
aaatatgtatgccaatccccaaattaggtaatttattctt

SEQ ID NO: 70469 - DNA, 40 bp, Homo sapiens
aagaataaattacctaatttggggattggcatacatattt

SEQ ID NO: 70470 - DNA, 40 bp, Homo sapiens
aatatgtatgccaatccccaaattaggtaatttattctta

SEQ ID NO: 70471 - DNA, 40 bp, Homo sapiens
taagaataaattacctaatttggggattggcatacatatt

SEQ ID NO: 70472 - DNA, 40 bp, Homo sapiens
atatgtatgccaatccccaaattaggtaatttattcttaa

SEQ ID NO: 70473 - DNA, 40 bp, Homo sapiens
ttaagaataaattacctaatttggggattggcatacatat

SEQ ID NO: 70474 - DNA, 40 bp, Homo sapiens
tatgtatgccaatccccaaattaggtaatttattcttaat

SEQ ID NO: 70475 - DNA, 40 bp, Homo sapiens
attaagaataaattacctaatttggggattggcatacata

SEQ ID NO: 70476 - DNA, 40 bp, Homo sapiens
atgtatgccaatccccaaattaggtaatttattcttaatt

SEQ ID NO: 70477 - DNA, 40 bp, Homo sapiens
aattaagaataaattacctaatttggggattggcatacat

SEQ ID NO: 70478 - DNA, 40 bp, Homo sapiens
tgtatgccaatccccaaattaggtaatttattcttaattt

SEQ ID NO: 70479 - DNA, 40 bp, Homo sapiens
aaattaagaataaattacctaatttggggattggcataca

SEQ ID NO: 70480 - DNA, 40 bp, Homo sapiens
gtatgccaatccccaaattaggtaatttattcttaatttt

SEQ ID NO: 70481 - DNA, 40 bp, Homo sapiens
aaaattaagaataaattacctaatttggggattggcatac

SEQ ID NO: 70482 - DNA, 40 bp, Homo sapiens
tatgccaatccccaaattaggtaatttattcttaatttta

SEQ ID NO: 70483 - DNA, 40 bp, Homo sapiens
taaaattaagaataaattacctaatttggggattggcata

SEQ ID NO: 70484 - DNA, 40 bp, Homo sapiens
atgccaatccccaaattaggtaatttattcttaattttaa

SEQ ID NO: 70485 - DNA, 40 bp, Homo sapiens
ttaaaattaagaataaattacctaatttggggattggcat

SEQ ID NO: 70486 - DNA, 40 bp, Homo sapiens
tgccaatccccaaattaggtaatttattcttaattttaag

SEQ ID NO: 70487 - DNA, 40 bp, Homo sapiens
cttaaaattaagaataaattacctaatttggggattggca

SEQ ID NO: 70488 - DNA, 40 bp, Homo sapiens
gccaatccccaaattaggtaatttattcttaattttaaga

SEQ ID NO: 70489 - DNA, 40 bp, Homo sapiens
tcttaaaattaagaataaattacctaatttggggattggc

SEQ ID NO: 70490 - DNA, 40 bp, Homo sapiens
ccaatccccaaattaggtaatttattcttaattttaagat

SEQ ID NO: 70491 - DNA, 40 bp, Homo sapiens
atcttaaaattaagaataaattacctaatttggggattgg

SEQ ID NO: 70492 - DNA, 40 bp, Homo sapiens
caatccccaaattaggtaatttattcttaattttaagata

SEQ ID NO: 70493 - DNA, 40 bp, Homo sapiens
tatcttaaaattaagaataaattacctaatttggggattg

SEQ ID NO: 70494 - DNA, 40 bp, Homo sapiens
aatccccaaattaggtaatttattcttaattttaagataa

SEQ ID NO: 70495 - DNA, 40 bp, Homo sapiens
ttatcttaaaattaagaataaattacctaatttggggatt

SEQ ID NO: 70496 - DNA, 40 bp, Homo sapiens
atccccaaattaggtaatttattcttaattttaagataaa

SEQ ID NO: 70497 - DNA, 40 bp, Homo sapiens
tttatcttaaaattaagaataaattacctaatttggggat

SEQ ID NO: 70498 - DNA, 40 bp, Homo sapiens
tccccaaattaggtaatttattcttaattttaagataaaa

SEQ ID NO: 70499 - DNA, 40 bp, Homo sapiens
ttttatcttaaaattaagaataaattacctaatttgggga

SEQ ID NO: 70500 - DNA, 40 bp, Homo sapiens
ccccaaattaggtaatttattcttaattttaagataaaag

SEQ ID NO: 70501 - DNA, 40 bp, Homo sapiens
cttttatcttaaaattaagaataaattacctaatttgggg

SEQ ID NO: 70502 - DNA, 40 bp, Homo sapiens
cccaaattaggtaatttattcttaattttaagataaaaga

SEQ ID NO: 70503 - DNA, 40 bp, Homo sapiens
tcttttatcttaaaattaagaataaattacctaatttggg

SEQ ID NO: 70504 - DNA, 40 bp, Homo sapiens
ccaaattaggtaatttattcttaattttaagataaaagaa

SEQ ID NO: 70505 - DNA, 40 bp, Homo sapiens
ttcttttatcttaaaattaagaataaattacctaatttgg

SEQ ID NO: 70506 - DNA, 40 bp, Homo sapiens
caaattaggtaatttattcttaattttaagataaaagaat

SEQ ID NO: 70507 - DNA, 40 bp, Homo sapiens
attcttttatcttaaaattaagaataaattacctaatttg

SEQ ID NO: 70508 - DNA, 40 bp, Homo sapiens
aaattaggtaatttattcttaattttaagataaaagaata

SEQ ID NO: 70509 - DNA, 40 bp, Homo sapiens
tattcttttatcttaaaattaagaataaattacctaattt

SEQ ID NO: 70510 - DNA, 40 bp, Homo sapiens
aattaggtaatttattcttaattttaagataaaagaatag

SEQ ID NO: 70511 - DNA, 40 bp, Homo sapiens
ctattcttttatcttaaaattaagaataaattacctaatt

SEQ ID NO: 70512 - DNA, 40 bp, Homo sapiens
attaggtaatttattcttaattttaagataaaagaataga

SEQ ID NO: 70513 - DNA, 40 bp, Homo sapiens
tctattcttttatcttaaaattaagaataaattacctaat

SEQ ID NO: 70514 - DNA, 40 bp, Homo sapiens
ttaggtaatttattcttaattttaagataaaagaatagaa

SEQ ID NO: 70515 - DNA, 40 bp, Homo sapiens
ttctattcttttatcttaaaattaagaataaattacctaa

SEQ ID NO: 70516 - DNA, 40 bp, Homo sapiens
taggtaatttattcttaattttaagataaaagaatagaat

SEQ ID NO: 70517 - DNA, 40 bp, Homo sapiens
attctattcttttatcttaaaattaagaataaattaccta

SEQ ID NO: 70518 - DNA, 40 bp, Homo sapiens
aggtaatttattcttaattttaagataaaagaatagaatt

SEQ ID NO: 70519 - DNA, 40 bp, Homo sapiens
aattctattcttttatcttaaaattaagaataaattacct

SEQ ID NO: 70520 - DNA, 40 bp, Homo sapiens
ggtaatttattcttaattttaagataaaagaatagaattc

SEQ ID NO: 70521 - DNA, 40 bp, Homo sapiens
gaattctattcttttatcttaaaattaagaataaattacc

SEQ ID NO: 70522 - DNA, 40 bp, Homo sapiens
gtaatttattcttaattttaagataaaagaatagaattcc

SEQ ID NO: 70523 - DNA, 40 bp, Homo sapiens
ggaattctattcttttatcttaaaattaagaataaattac

SEQ ID NO: 70524 - DNA, 40 bp, Homo sapiens
taatttattcttaattttaagataaaagaatagaattccc

SEQ ID NO: 70525 - DNA, 40 bp, Homo sapiens
gggaattctattcttttatcttaaaattaagaataaatta

SEQ ID NO: 70526 - DNA, 40 bp, Homo sapiens
aatttattcttaattttaagataaaagaatagaattccct

SEQ ID NO: 70527 - DNA, 40 bp, Homo sapiens
agggaattctattcttttatcttaaaattaagaataaatt

SEQ ID NO: 70528 - DNA, 40 bp, Homo sapiens
atttattcttaattttaagataaaagaatagaattccctt

SEQ ID NO: 70529 - DNA, 40 bp, Homo sapiens
aagggaattctattcttttatcttaaaattaagaataaat

SEQ ID NO: 70530 - DNA, 40 bp, Homo sapiens
tttattcttaattttaagataaaagaatagaattccctta

SEQ ID NO: 70531 - DNA, 40 bp, Homo sapiens
taagggaattctattcttttatcttaaaattaagaataaa

SEQ ID NO: 70532 - DNA, 40 bp, Homo sapiens
ttattcttaattttaagataaaagaatagaattcccttaa

SEQ ID NO: 70533 - DNA, 40 bp, Homo sapiens
ttaagggaattctattcttttatcttaaaattaagaataa

SEQ ID NO: 70534 - DNA, 40 bp, Homo sapiens
tattcttaattttaagataaaagaatagaattcccttaaa

SEQ ID NO: 70535 - DNA, 40 bp, Homo sapiens
tttaagggaattctattcttttatcttaaaattaagaata

SEQ ID NO: 70536 - DNA, 40 bp, Homo sapiens
attcttaattttaagataaaagaatagaattcccttaaaa

SEQ ID NO: 70537 - DNA, 40 bp, Homo sapiens
ttttaagggaattctattcttttatcttaaaattaagaat

SEQ ID NO: 70538 - DNA, 40 bp, Homo sapiens
ttcttaattttaagataaaagaatagaattcccttaaaat

SEQ ID NO: 70539 - DNA, 40 bp, Homo sapiens
attttaagggaattctattcttttatcttaaaattaagaa

SEQ ID NO: 70540 - DNA, 40 bp, Homo sapiens
tcttaattttaagataaaagaatagaattcccttaaaatt

SEQ ID NO: 70541 - DNA, 40 bp, Homo sapiens
aattttaagggaattctattcttttatcttaaaattaaga

SEQ ID NO: 70542 - DNA, 40 bp, Homo sapiens
cttaattttaagataaaagaatagaattcccttaaaatta

SEQ ID NO: 70543 - DNA, 40 bp, Homo sapiens
taattttaagggaattctattcttttatcttaaaattaag

SEQ ID NO: 70544 - DNA, 40 bp, Homo sapiens
ttaattttaagataaaagaatagaattcccttaaaattaa

SEQ ID NO: 70545 - DNA, 40 bp, Homo sapiens
ttaattttaagggaattctattcttttatcttaaaattaa

SEQ ID NO: 70546 - DNA, 40 bp, Homo sapiens
taattttaagataaaagaatagaattcccttaaaattaaa

SEQ ID NO: 70547 - DNA, 40 bp, Homo sapiens
tttaattttaagggaattctattcttttatcttaaaatta

SEQ ID NO: 70548 - DNA, 40 bp, Homo sapiens
aattttaagataaaagaatagaattcccttaaaattaaat

SEQ ID NO: 70549 - DNA, 40 bp, Homo sapiens
atttaattttaagggaattctattcttttatcttaaaatt

SEQ ID NO: 70550 - DNA, 40 bp, Homo sapiens
attttaagataaaagaatagaattcccttaaaattaaatg

SEQ ID NO: 70551 - DNA, 40 bp, Homo sapiens
catttaattttaagggaattctattcttttatcttaaaat

SEQ ID NO: 70552 - DNA, 40 bp, Homo sapiens
ttttaagataaaagaatagaattcccttaaaattaaatgt

SEQ ID NO: 70553 - DNA, 40 bp, Homo sapiens
acatttaattttaagggaattctattcttttatcttaaaa

SEQ ID NO: 70554 - DNA, 40 bp, Homo sapiens
tttaagataaaagaatagaattcccttaaaattaaatgtg

SEQ ID NO: 70555 - DNA, 40 bp, Homo sapiens
cacatttaattttaagggaattctattcttttatcttaaa

SEQ ID NO: 70556 - DNA, 40 bp, Homo sapiens
ttaagataaaagaatagaattcccttaaaattaaatgtgg

SEQ ID NO: 70557 - DNA, 40 bp, Homo sapiens
ccacatttaattttaagggaattctattcttttatcttaa

SEQ ID NO: 70558 - DNA, 40 bp, Homo sapiens
taagataaaagaatagaattcccttaaaattaaatgtgga

SEQ ID NO: 70559 - DNA, 40 bp, Homo sapiens
tccacatttaattttaagggaattctattcttttatctta

SEQ ID NO: 70560 - DNA, 40 bp, Homo sapiens
aagataaaagaatagaattcccttaaaattaaatgtggag

SEQ ID NO: 70561 - DNA, 40 bp, Homo sapiens
ctccacatttaattttaagggaattctattcttttatctt

SEQ ID NO: 70562 - DNA, 40 bp, Homo sapiens
agataaaagaatagaattcccttaaaattaaatgtggagt

SEQ ID NO: 70563 - DNA, 40 bp, Homo sapiens
actccacatttaattttaagggaattctattcttttatct

SEQ ID NO: 70564 - DNA, 40 bp, Homo sapiens
gataaaagaatagaattcccttaaaattaaatgtggagta

SEQ ID NO: 70565 - DNA, 40 bp, Homo sapiens
tactccacatttaattttaagggaattctattcttttatc

SEQ ID NO: 70566 - DNA, 40 bp, Homo sapiens
ataaaagaatagaattcccttaaaattaaatgtggagtaa

SEQ ID NO: 70567 - DNA, 40 bp, Homo sapiens
ttactccacatttaattttaagggaattctattcttttat

SEQ ID NO: 70568 - DNA, 40 bp, Homo sapiens
taaaagaatagaattcccttaaaattaaatgtggagtaaa

SEQ ID NO: 70569 - DNA, 40 bp, Homo sapiens
tttactccacatttaattttaagggaattctattctttta

SEQ ID NO: 70570 - DNA, 40 bp, Homo sapiens
aaaagaatagaattcccttaaaattaaatgtggagtaaaa

SEQ ID NO: 70571 - DNA, 40 bp, Homo sapiens
ttttactccacatttaattttaagggaattctattctttt

SEQ ID NO: 70572 - DNA, 40 bp, Homo sapiens
aaagaatagaattcccttaaaattaaatgtggagtaaaat

SEQ ID NO: 70573 - DNA, 40 bp, Homo sapiens
attttactccacatttaattttaagggaattctattcttt

SEQ ID NO: 70574 - DNA, 40 bp, Homo sapiens
aagaatagaattcccttaaaattaaatgtggagtaaaata

SEQ ID NO: 70575 - DNA, 40 bp, Homo sapiens
tattttactccacatttaattttaagggaattctattctt

SEQ ID NO: 70576 - DNA, 40 bp, Homo sapiens
agaatagaattcccttaaaattaaatgtggagtaaaatat

SEQ ID NO: 70577 - DNA, 40 bp, Homo sapiens
atattttactccacatttaattttaagggaattctattct

SEQ ID NO: 70578 - DNA, 40 bp, Homo sapiens
gaatagaattcccttaaaattaaatgtggagtaaaatata

SEQ ID NO: 70579 - DNA, 40 bp, Homo sapiens
tatattttactccacatttaattttaagggaattctattc

SEQ ID NO: 70580 - DNA, 40 bp, Homo sapiens
aatagaattcccttaaaattaaatgtggagtaaaatatac

SEQ ID NO: 70581 - DNA, 40 bp, Homo sapiens
gtatattttactccacatttaattttaagggaattctatt

SEQ ID NO: 70582 - DNA, 40 bp, Homo sapiens
atagaattcccttaaaattaaatgtggagtaaaatatacc

SEQ ID NO: 70583 - DNA, 40 bp, Homo sapiens
ggtatattttactccacatttaattttaagggaattctat

SEQ ID NO: 70584 - DNA, 40 bp, Homo sapiens
tagaattcccttaaaattaaatgtggagtaaaatatacca

SEQ ID NO: 70585 - DNA, 40 bp, Homo sapiens
tggtatattttactccacatttaattttaagggaattcta

SEQ ID NO: 70586 - DNA, 40 bp, Homo sapiens
agaattcccttaaaattaaatgtggagtaaaatataccag

SEQ ID NO: 70587 - DNA, 40 bp, Homo sapiens
ctggtatattttactccacatttaattttaagggaattct

SEQ ID NO: 70588 - DNA, 40 bp, Homo sapiens
gaattcccttaaaattaaatgtggagtaaaatataccagc

SEQ ID NO: 70589 - DNA, 40 bp, Homo sapiens
gctggtatattttactccacatttaattttaagggaattc

SEQ ID NO: 70590 - DNA, 40 bp, Homo sapiens
aattcccttaaaattaaatgtggagtaaaatataccagct

SEQ ID NO: 70591 - DNA, 40 bp, Homo sapiens
agctggtatattttactccacatttaattttaagggaatt

SEQ ID NO: 70592 - DNA, 40 bp, Homo sapiens
attcccttaaaattaaatgtggagtaaaatataccagctt

SEQ ID NO: 70593 - DNA, 40 bp, Homo sapiens
aagctggtatattttactccacatttaattttaagggaat

SEQ ID NO: 70594 - DNA, 40 bp, Homo sapiens
ttcccttaaaattaaatgtggagtaaaatataccagcttt

SEQ ID NO: 70595 - DNA, 40 bp, Homo sapiens
aaagctggtatattttactccacatttaattttaagggaa

SEQ ID NO: 70596 - DNA, 40 bp, Homo sapiens
tcccttaaaattaaatgtggagtaaaatataccagcttta

SEQ ID NO: 70597 - DNA, 40 bp, Homo sapiens
taaagctggtatattttactccacatttaattttaaggga

SEQ ID NO: 70598 - DNA, 40 bp, Homo sapiens
cccttaaaattaaatgtggagtaaaatataccagctttaa

SEQ ID NO: 70599 - DNA, 40 bp, Homo sapiens
ttaaagctggtatattttactccacatttaattttaaggg

SEQ ID NO: 70600 - DNA, 40 bp, Homo sapiens
ccttaaaattaaatgtggagtaaaatataccagctttaaa

SEQ ID NO: 70601 - DNA, 40 bp, Homo sapiens
tttaaagctggtatattttactccacatttaattttaagg

SEQ ID NO: 70602 - DNA, 40 bp, Homo sapiens
cttaaaattaaatgtggagtaaaatataccagctttaaaa

SEQ ID NO: 70603 - DNA, 40 bp, Homo sapiens
ttttaaagctggtatattttactccacatttaattttaag

SEQ ID NO: 70604 - DNA, 40 bp, Homo sapiens
ttaaaattaaatgtggagtaaaatataccagctttaaaaa

SEQ ID NO: 70605 - DNA, 40 bp, Homo sapiens
tttttaaagctggtatattttactccacatttaattttaa

SEQ ID NO: 70606 - DNA, 40 bp, Homo sapiens
taaaattaaatgtggagtaaaatataccagctttaaaaaa

SEQ ID NO: 70607 - DNA, 40 bp, Homo sapiens
ttttttaaagctggtatattttactccacatttaatttta

SEQ ID NO: 70608 - DNA, 40 bp, Homo sapiens
aaaattaaatgtggagtaaaatataccagctttaaaaaat

SEQ ID NO: 70609 - DNA, 40 bp, Homo sapiens
attttttaaagctggtatattttactccacatttaatttt

SEQ ID NO: 70610 - DNA, 40 bp, Homo sapiens
aaattaaatgtggagtaaaatataccagctttaaaaaata

SEQ ID NO: 70611 - DNA, 40 bp, Homo sapiens
tattttttaaagctggtatattttactccacatttaattt

SEQ ID NO: 70612 - DNA, 40 bp, Homo sapiens
aattaaatgtggagtaaaatataccagctttaaaaaatat

SEQ ID NO: 70613 - DNA, 40 bp, Homo sapiens
atattttttaaagctggtatattttactccacatttaatt

SEQ ID NO: 70614 - DNA, 40 bp, Homo sapiens
attaaatgtggagtaaaatataccagctttaaaaaatatt

SEQ ID NO: 70615 - DNA, 40 bp, Homo sapiens
aatattttttaaagctggtatattttactccacatttaat

SEQ ID NO: 70616 - DNA, 40 bp, Homo sapiens
ttaaatgtggagtaaaatataccagctttaaaaaatattc

SEQ ID NO: 70617 - DNA, 40 bp, Homo sapiens
gaatattttttaaagctggtatattttactccacatttaa

SEQ ID NO: 70618 - DNA, 40 bp, Homo sapiens
taaatgtggagtaaaatataccagctttaaaaaatattca

SEQ ID NO: 70619 - DNA, 40 bp, Homo sapiens
tgaatattttttaaagctggtatattttactccacattta

SEQ ID NO: 70620 - DNA, 40 bp, Homo sapiens
aaatgtggagtaaaatataccagctttaaaaaatattcac

SEQ ID NO: 70621 - DNA, 40 bp, Homo sapiens
gtgaatattttttaaagctggtatattttactccacattt

SEQ ID NO: 70622 - DNA, 40 bp, Homo sapiens
aatgtggagtaaaatataccagctttaaaaaatattcacc

SEQ ID NO: 70623 - DNA, 40 bp, Homo sapiens
ggtgaatattttttaaagctggtatattttactccacatt

SEQ ID NO: 70624 - DNA, 40 bp, Homo sapiens
atgtggagtaaaatataccagctttaaaaaatattcacct

SEQ ID NO: 70625 - DNA, 40 bp, Homo sapiens
aggtgaatattttttaaagctggtatattttactccacat

SEQ ID NO: 70626 - DNA, 40 bp, Homo sapiens
tgtggagtaaaatataccagctttaaaaaatattcacctt

SEQ ID NO: 70627 - DNA, 40 bp, Homo sapiens
aaggtgaatattttttaaagctggtatattttactccaca

SEQ ID NO: 70628 - DNA, 40 bp, Homo sapiens
gtggagtaaaatataccagctttaaaaaatattcaccttt

SEQ ID NO: 70629 - DNA, 40 bp, Homo sapiens
aaaggtgaatattttttaaagctggtatattttactccac

SEQ ID NO: 70630 - DNA, 40 bp, Homo sapiens
tggagtaaaatataccagctttaaaaaatattcacctttc

SEQ ID NO: 70631 - DNA, 40 bp, Homo sapiens
gaaaggtgaatattttttaaagctggtatattttactcca

SEQ ID NO: 70632 - DNA, 40 bp, Homo sapiens
ggagtaaaatataccagctttaaaaaatattcacctttct

SEQ ID NO: 70633 - DNA, 40 bp, Homo sapiens
agaaaggtgaatattttttaaagctggtatattttactcc

SEQ ID NO: 70634 - DNA, 40 bp, Homo sapiens
gagtaaaatataccagctttaaaaaatattcacctttctg

SEQ ID NO: 70635 - DNA, 40 bp, Homo sapiens
cagaaaggtgaatattttttaaagctggtatattttactc

SEQ ID NO: 70636 - DNA, 40 bp, Homo sapiens
agtaaaatataccagctttaaaaaatattcacctttctgt

SEQ ID NO: 70637 - DNA, 40 bp, Homo sapiens
acagaaaggtgaatattttttaaagctggtatattttact

SEQ ID NO: 70638 - DNA, 40 bp, Homo sapiens
gtaaaatataccagctttaaaaaatattcacctttctgtt

SEQ ID NO: 70639 - DNA, 40 bp, Homo sapiens
aacagaaaggtgaatattttttaaagctggtatattttac

SEQ ID NO: 70640 - DNA, 40 bp, Homo sapiens
taaaatataccagctttaaaaaatattcacctttctgtta

SEQ ID NO: 70641 - DNA, 40 bp, Homo sapiens
taacagaaaggtgaatattttttaaagctggtatatttta

SEQ ID NO: 70642 - DNA, 40 bp, Homo sapiens
aaaatataccagctttaaaaaatattcacctttctgttag

SEQ ID NO: 70643 - DNA, 40 bp, Homo sapiens
ctaacagaaaggtgaatattttttaaagctggtatatttt

SEQ ID NO: 70644 - DNA, 40 bp, Homo sapiens
aaatataccagctttaaaaaatattcacctttctgttaga

SEQ ID NO: 70645 - DNA, 40 bp, Homo sapiens
tctaacagaaaggtgaatattttttaaagctggtatattt

SEQ ID NO: 70646 - DNA, 40 bp, Homo sapiens
aatataccagctttaaaaaatattcacctttctgttagaa

SEQ ID NO: 70647 - DNA, 40 bp, Homo sapiens
ttctaacagaaaggtgaatattttttaaagctggtatatt

SEQ ID NO: 70648 - DNA, 40 bp, Homo sapiens
atataccagctttaaaaaatattcacctttctgttagaag

SEQ ID NO: 70649 - DNA, 40 bp, Homo sapiens
cttctaacagaaaggtgaatattttttaaagctggtatat

SEQ ID NO: 70650 - DNA, 40 bp, Homo sapiens
tataccagctttaaaaaatattcacctttctgttagaaga

SEQ ID NO: 70651 - DNA, 40 bp, Homo sapiens
tcttctaacagaaaggtgaatattttttaaagctggtata

SEQ ID NO: 70652 - DNA, 40 bp, Homo sapiens
ataccagctttaaaaaatattcacctttctgttagaagaa

SEQ ID NO: 70653 - DNA, 40 bp, Homo sapiens
ttcttctaacagaaaggtgaatattttttaaagctggtat

SEQ ID NO: 70654 - DNA, 40 bp, Homo sapiens
taccagctttaaaaaatattcacctttctgttagaagaat

SEQ ID NO: 70655 - DNA, 40 bp, Homo sapiens
attcttctaacagaaaggtgaatattttttaaagctggta

SEQ ID NO: 70656 - DNA, 40 bp, Homo sapiens
accagctttaaaaaatattcacctttctgttagaagaatg

SEQ ID NO: 70657 - DNA, 40 bp, Homo sapiens
cattcttctaacagaaaggtgaatattttttaaagctggt

SEQ ID NO: 70658 - DNA, 40 bp, Homo sapiens
ccagctttaaaaaatattcacctttctgttagaagaatga

SEQ ID NO: 70659 - DNA, 40 bp, Homo sapiens
tcattcttctaacagaaaggtgaatattttttaaagctgg

SEQ ID NO: 70660 - DNA, 40 bp, Homo sapiens
cagctttaaaaaatattcacctttctgttagaagaatgaa

SEQ ID NO: 70661 - DNA, 40 bp, Homo sapiens
ttcattcttctaacagaaaggtgaatattttttaaagctg

SEQ ID NO: 70662 - DNA, 40 bp, Homo sapiens
agctttaaaaaatattcacctttctgttagaagaatgaac

SEQ ID NO: 70663 - DNA, 40 bp, Homo sapiens
gttcattcttctaacagaaaggtgaatattttttaaagct

SEQ ID NO: 70664 - DNA, 40 bp, Homo sapiens
gctttaaaaaatattcacctttctgttagaagaatgaaca

SEQ ID NO: 70665 - DNA, 40 bp, Homo sapiens
tgttcattcttctaacagaaaggtgaatattttttaaagc

SEQ ID NO: 70666 - DNA, 40 bp, Homo sapiens
ctttaaaaaatattcacctttctgttagaagaatgaacat

SEQ ID NO: 70667 - DNA, 40 bp, Homo sapiens
atgttcattcttctaacagaaaggtgaatattttttaaag

SEQ ID NO: 70668 - DNA, 40 bp, Homo sapiens
tttaaaaaatattcacctttctgttagaagaatgaacata

SEQ ID NO: 70669 - DNA, 40 bp, Homo sapiens
tatgttcattcttctaacagaaaggtgaatattttttaaa

SEQ ID NO: 70670 - DNA, 40 bp, Homo sapiens
ttaaaaaatattcacctttctgttagaagaatgaacataa

SEQ ID NO: 70671 - DNA, 40 bp, Homo sapiens
ttatgttcattcttctaacagaaaggtgaatattttttaa

SEQ ID NO: 70672 - DNA, 40 bp, Homo sapiens
taaaaaatattcacctttctgttagaagaatgaacataat

SEQ ID NO: 70673 - DNA, 40 bp, Homo sapiens
attatgttcattcttctaacagaaaggtgaatatttttta

SEQ ID NO: 70674 - DNA, 40 bp, Homo sapiens
aaaaaatattcacctttctgttagaagaatgaacataata

SEQ ID NO: 70675 - DNA, 40 bp, Homo sapiens
tattatgttcattcttctaacagaaaggtgaatatttttt

SEQ ID NO: 70676 - DNA, 40 bp, Homo sapiens
aaaaatattcacctttctgttagaagaatgaacataatat

SEQ ID NO: 70677 - DNA, 40 bp, Homo sapiens
atattatgttcattcttctaacagaaaggtgaatattttt

SEQ ID NO: 70678 - DNA, 40 bp, Homo sapiens
aaaatattcacctttctgttagaagaatgaacataatatt

SEQ ID NO: 70679 - DNA, 40 bp, Homo sapiens
aatattatgttcattcttctaacagaaaggtgaatatttt

SEQ ID NO: 70680 - DNA, 40 bp, Homo sapiens
aaatattcacctttctgttagaagaatgaacataatatta

SEQ ID NO: 70681 - DNA, 40 bp, Homo sapiens
taatattatgttcattcttctaacagaaaggtgaatattt

SEQ ID NO: 70682 - DNA, 40 bp, Homo sapiens
aatattcacctttctgttagaagaatgaacataatattac

SEQ ID NO: 70683 - DNA, 40 bp, Homo sapiens
gtaatattatgttcattcttctaacagaaaggtgaatatt

SEQ ID NO: 70684 - DNA, 40 bp, Homo sapiens
atattcacctttctgttagaagaatgaacataatattaca

SEQ ID NO: 70685 - DNA, 40 bp, Homo sapiens
tgtaatattatgttcattcttctaacagaaaggtgaatat

SEQ ID NO: 70686 - DNA, 40 bp, Homo sapiens
tattcacctttctgttagaagaatgaacataatattacat

SEQ ID NO: 70687 - DNA, 40 bp, Homo sapiens
atgtaatattatgttcattcttctaacagaaaggtgaata

SEQ ID NO: 70688 - DNA, 40 bp, Homo sapiens
attcacctttctgttagaagaatgaacataatattacatc

SEQ ID NO: 70689 - DNA, 40 bp, Homo sapiens
gatgtaatattatgttcattcttctaacagaaaggtgaat

SEQ ID NO: 70690 - DNA, 40 bp, Homo sapiens
ttcacctttctgttagaagaatgaacataatattacatct

SEQ ID NO: 70691 - DNA, 40 bp, Homo sapiens
agatgtaatattatgttcattcttctaacagaaaggtgaa

SEQ ID NO: 70692 - DNA, 40 bp, Homo sapiens
tcacctttctgttagaagaatgaacataatattacatctt

SEQ ID NO: 70693 - DNA, 40 bp, Homo sapiens
aagatgtaatattatgttcattcttctaacagaaaggtga

SEQ ID NO: 70694 - DNA, 40 bp, Homo sapiens
cacctttctgttagaagaatgaacataatattacatcttt

SEQ ID NO: 70695 - DNA, 40 bp, Homo sapiens
aaagatgtaatattatgttcattcttctaacagaaaggtg

SEQ ID NO: 70696 - DNA, 40 bp, Homo sapiens
acctttctgttagaagaatgaacataatattacatctttt

SEQ ID NO: 70697 - DNA, 40 bp, Homo sapiens
aaaagatgtaatattatgttcattcttctaacagaaaggt

SEQ ID NO: 70698 - DNA, 40 bp, Homo sapiens
cctttctgttagaagaatgaacataatattacatctttta

SEQ ID NO: 70699 - DNA, 40 bp, Homo sapiens
taaaagatgtaatattatgttcattcttctaacagaaagg

SEQ ID NO: 70700 - DNA, 40 bp, Homo sapiens
ctttctgttagaagaatgaacataatattacatcttttaa

SEQ ID NO: 70701 - DNA, 40 bp, Homo sapiens
ttaaaagatgtaatattatgttcattcttctaacagaaag

SEQ ID NO: 70702 - DNA, 40 bp, Homo sapiens
tttctgttagaagaatgaacataatattacatcttttaat

SEQ ID NO: 70703 - DNA, 40 bp, Homo sapiens
attaaaagatgtaatattatgttcattcttctaacagaaa

SEQ ID NO: 70704 - DNA, 40 bp, Homo sapiens
ttctgttagaagaatgaacataatattacatcttttaatt

SEQ ID NO: 70705 - DNA, 40 bp, Homo sapiens
aattaaaagatgtaatattatgttcattcttctaacagaa

SEQ ID NO: 70706 - DNA, 40 bp, Homo sapiens
tctgttagaagaatgaacataatattacatcttttaattt

SEQ ID NO: 70707 - DNA, 40 bp, Homo sapiens
aaattaaaagatgtaatattatgttcattcttctaacaga

SEQ ID NO: 70708 - DNA, 40 bp, Homo sapiens
ctgttagaagaatgaacataatattacatcttttaatttg

SEQ ID NO: 70709 - DNA, 40 bp, Homo sapiens
caaattaaaagatgtaatattatgttcattcttctaacag

SEQ ID NO: 70710 - DNA, 40 bp, Homo sapiens
tgttagaagaatgaacataatattacatcttttaatttgc

SEQ ID NO: 70711 - DNA, 40 bp, Homo sapiens
gcaaattaaaagatgtaatattatgttcattcttctaaca

SEQ ID NO: 70712 - DNA, 40 bp, Homo sapiens
gttagaagaatgaacataatattacatcttttaatttgca

SEQ ID NO: 70713 - DNA, 40 bp, Homo sapiens
tgcaaattaaaagatgtaatattatgttcattcttctaac

SEQ ID NO: 70714 - DNA, 40 bp, Homo sapiens
ttagaagaatgaacataatattacatcttttaatttgcac

SEQ ID NO: 70715 - DNA, 40 bp, Homo sapiens
gtgcaaattaaaagatgtaatattatgttcattcttctaa

SEQ ID NO: 70716 - DNA, 40 bp, Homo sapiens
tagaagaatgaacataatattacatcttttaatttgcact

SEQ ID NO: 70717 - DNA, 40 bp, Homo sapiens
agtgcaaattaaaagatgtaatattatgttcattcttcta

SEQ ID NO: 70718 - DNA, 40 bp, Homo sapiens
agaagaatgaacataatattacatcttttaatttgcacta

SEQ ID NO: 70719 - DNA, 40 bp, Homo sapiens
tagtgcaaattaaaagatgtaatattatgttcattcttct

SEQ ID NO: 70720 - DNA, 40 bp, Homo sapiens
gaagaatgaacataatattacatcttttaatttgcactat

SEQ ID NO: 70721 - DNA, 40 bp, Homo sapiens
atagtgcaaattaaaagatgtaatattatgttcattcttc

SEQ ID NO: 70722 - DNA, 40 bp, Homo sapiens
aagaatgaacataatattacatcttttaatttgcactata

SEQ ID NO: 70723 - DNA, 40 bp, Homo sapiens
tatagtgcaaattaaaagatgtaatattatgttcattctt

SEQ ID NO: 70724 - DNA, 40 bp, Homo sapiens
agaatgaacataatattacatcttttaatttgcactatat

SEQ ID NO: 70725 - DNA, 40 bp, Homo sapiens
atatagtgcaaattaaaagatgtaatattatgttcattct

SEQ ID NO: 70726 - DNA, 40 bp, Homo sapiens
gaatgaacataatattacatcttttaatttgcactatata

SEQ ID NO: 70727 - DNA, 40 bp, Homo sapiens
tatatagtgcaaattaaaagatgtaatattatgttcattc

SEQ ID NO: 70728 - DNA, 40 bp, Homo sapiens
aatgaacataatattacatcttttaatttgcactatatat

SEQ ID NO: 70729 - DNA, 40 bp, Homo sapiens
atatatagtgcaaattaaaagatgtaatattatgttcatt

SEQ ID NO: 70730 - DNA, 40 bp, Homo sapiens
atgaacataatattacatcttttaatttgcactatatata

SEQ ID NO: 70731 - DNA, 40 bp, Homo sapiens
tatatatagtgcaaattaaaagatgtaatattatgttcat

SEQ ID NO: 70732 - DNA, 40 bp, Homo sapiens
tgaacataatattacatcttttaatttgcactatatatag

SEQ ID NO: 70733 - DNA, 40 bp, Homo sapiens
ctatatatagtgcaaattaaaagatgtaatattatgttca

SEQ ID NO: 70734 - DNA, 40 bp, Homo sapiens
gaacataatattacatcttttaatttgcactatatataga

SEQ ID NO: 70735 - DNA, 40 bp, Homo sapiens
tctatatatagtgcaaattaaaagatgtaatattatgttc

SEQ ID NO: 70736 - DNA, 40 bp, Homo sapiens
aacataatattacatcttttaatttgcactatatatagat

SEQ ID NO: 70737 - DNA, 40 bp, Homo sapiens
atctatatatagtgcaaattaaaagatgtaatattatgtt

SEQ ID NO: 70738 - DNA, 40 bp, Homo sapiens
acataatattacatcttttaatttgcactatatatagatt

SEQ ID NO: 70739 - DNA, 40 bp, Homo sapiens
aatctatatatagtgcaaattaaaagatgtaatattatgt

SEQ ID NO: 70740 - DNA, 40 bp, Homo sapiens
cataatattacatcttttaatttgcactatatatagatta

SEQ ID NO: 70741 - DNA, 40 bp, Homo sapiens
taatctatatatagtgcaaattaaaagatgtaatattatg

SEQ ID NO: 70742 - DNA, 40 bp, Homo sapiens
ataatattacatcttttaatttgcactatatatagattaa

SEQ ID NO: 70743 - DNA, 40 bp, Homo sapiens
ttaatctatatatagtgcaaattaaaagatgtaatattat

SEQ ID NO: 70744 - DNA, 40 bp, Homo sapiens
taatattacatcttttaatttgcactatatatagattaat

SEQ ID NO: 70745 - DNA, 40 bp, Homo sapiens
attaatctatatatagtgcaaattaaaagatgtaatatta

SEQ ID NO: 70746 - DNA, 40 bp, Homo sapiens
aatattacatcttttaatttgcactatatatagattaata

SEQ ID NO: 70747 - DNA, 40 bp, Homo sapiens
tattaatctatatatagtgcaaattaaaagatgtaatatt

SEQ ID NO: 70748 - DNA, 40 bp, Homo sapiens
atattacatcttttaatttgcactatatatagattaatat

SEQ ID NO: 70749 - DNA, 40 bp, Homo sapiens
atattaatctatatatagtgcaaattaaaagatgtaatat

SEQ ID NO: 70750 - DNA, 40 bp, Homo sapiens
tattacatcttttaatttgcactatatatagattaatatt

SEQ ID NO: 70751 - DNA, 40 bp, Homo sapiens
aatattaatctatatatagtgcaaattaaaagatgtaata

SEQ ID NO: 70752 - DNA, 40 bp, Homo sapiens
attacatcttttaatttgcactatatatagattaatattt

SEQ ID NO: 70753 - DNA, 40 bp, Homo sapiens
aaatattaatctatatatagtgcaaattaaaagatgtaat

SEQ ID NO: 70754 - DNA, 40 bp, Homo sapiens
ttacatcttttaatttgcactatatatagattaatatttc

SEQ ID NO: 70755 - DNA, 40 bp, Homo sapiens
gaaatattaatctatatatagtgcaaattaaaagatgtaa

SEQ ID NO: 70756 - DNA, 40 bp, Homo sapiens
tacatcttttaatttgcactatatatagattaatatttct

SEQ ID NO: 70757 - DNA, 40 bp, Homo sapiens
agaaatattaatctatatatagtgcaaattaaaagatgta

SEQ ID NO: 70758 - DNA, 40 bp, Homo sapiens
acatcttttaatttgcactatatatagattaatatttctg

SEQ ID NO: 70759 - DNA, 40 bp, Homo sapiens
cagaaatattaatctatatatagtgcaaattaaaagatgt

SEQ ID NO: 70760 - DNA, 40 bp, Homo sapiens
catcttttaatttgcactatatatagattaatatttctgt

SEQ ID NO: 70761 - DNA, 40 bp, Homo sapiens
acagaaatattaatctatatatagtgcaaattaaaagatg

SEQ ID NO: 70762 - DNA, 40 bp, Homo sapiens
atcttttaatttgcactatatatagattaatatttctgtg

SEQ ID NO: 70763 - DNA, 40 bp, Homo sapiens
cacagaaatattaatctatatatagtgcaaattaaaagat

SEQ ID NO: 70764 - DNA, 40 bp, Homo sapiens
tcttttaatttgcactatatatagattaatatttctgtgt

SEQ ID NO: 70765 - DNA, 40 bp, Homo sapiens
acacagaaatattaatctatatatagtgcaaattaaaaga

SEQ ID NO: 70766 - DNA, 40 bp, Homo sapiens
cttttaatttgcactatatatagattaatatttctgtgta

SEQ ID NO: 70767 - DNA, 40 bp, Homo sapiens
tacacagaaatattaatctatatatagtgcaaattaaaag

SEQ ID NO: 70768 - DNA, 40 bp, Homo sapiens
ttttaatttgcactatatatagattaatatttctgtgtat

SEQ ID NO: 70769 - DNA, 40 bp, Homo sapiens
atacacagaaatattaatctatatatagtgcaaattaaaa

SEQ ID NO: 70770 - DNA, 40 bp, Homo sapiens
tttaatttgcactatatatagattaatatttctgtgtatt

SEQ ID NO: 70771 - DNA, 40 bp, Homo sapiens
aatacacagaaatattaatctatatatagtgcaaattaaa

SEQ ID NO: 70772 - DNA, 40 bp, Homo sapiens
ttaatttgcactatatatagattaatatttctgtgtattt

SEQ ID NO: 70773 - DNA, 40 bp, Homo sapiens
aaatacacagaaatattaatctatatatagtgcaaattaa

SEQ ID NO: 70774 - DNA, 40 bp, Homo sapiens
taatttgcactatatatagattaatatttctgtgtatttc

SEQ ID NO: 70775 - DNA, 40 bp, Homo sapiens
gaaatacacagaaatattaatctatatatagtgcaaatta

SEQ ID NO: 70776 - DNA, 40 bp, Homo sapiens
aatttgcactatatatagattaatatttctgtgtatttct

SEQ ID NO: 70777 - DNA, 40 bp, Homo sapiens
agaaatacacagaaatattaatctatatatagtgcaaatt

SEQ ID NO: 70778 - DNA, 40 bp, Homo sapiens
atttgcactatatatagattaatatttctgtgtatttctc

SEQ ID NO: 70779 - DNA, 40 bp, Homo sapiens
gagaaatacacagaaatattaatctatatatagtgcaaat

SEQ ID NO: 70780 - DNA, 40 bp, Homo sapiens
tttgcactatatatagattaatatttctgtgtatttctct

SEQ ID NO: 70781 - DNA, 40 bp, Homo sapiens
agagaaatacacagaaatattaatctatatatagtgcaaa

SEQ ID NO: 70782 - DNA, 40 bp, Homo sapiens
ttgcactatatatagattaatatttctgtgtatttctctg

SEQ ID NO: 70783 - DNA, 40 bp, Homo sapiens
cagagaaatacacagaaatattaatctatatatagtgcaa

SEQ ID NO: 70784 - DNA, 40 bp, Homo sapiens
tgcactatatatagattaatatttctgtgtatttctctgt

SEQ ID NO: 70785 - DNA, 40 bp, Homo sapiens
acagagaaatacacagaaatattaatctatatatagtgca

SEQ ID NO: 70786 - DNA, 40 bp, Homo sapiens
gcactatatatagattaatatttctgtgtatttctctgtg

SEQ ID NO: 70787 - DNA, 40 bp, Homo sapiens
cacagagaaatacacagaaatattaatctatatatagtgc

SEQ ID NO: 70788 - DNA, 40 bp, Homo sapiens
cactatatatagattaatatttctgtgtatttctctgtgc

SEQ ID NO: 70789 - DNA, 40 bp, Homo sapiens
gcacagagaaatacacagaaatattaatctatatatagtg

SEQ ID NO: 70790 - DNA, 40 bp, Homo sapiens
actatatatagattaatatttctgtgtatttctctgtgcc

SEQ ID NO: 70791 - DNA, 40 bp, Homo sapiens
ggcacagagaaatacacagaaatattaatctatatatagt

SEQ ID NO: 70792 - DNA, 40 bp, Homo sapiens
ctatatatagattaatatttctgtgtatttctctgtgccc

SEQ ID NO: 70793 - DNA, 40 bp, Homo sapiens
gggcacagagaaatacacagaaatattaatctatatatag

SEQ ID NO: 70794 - DNA, 40 bp, Homo sapiens
tatatatagattaatatttctgtgtatttctctgtgcccc

SEQ ID NO: 70795 - DNA, 40 bp, Homo sapiens
ggggcacagagaaatacacagaaatattaatctatatata

SEQ ID NO: 70796 - DNA, 40 bp, Homo sapiens
atatatagattaatatttctgtgtatttctctgtgcccct

SEQ ID NO: 70797 - DNA, 40 bp, Homo sapiens
aggggcacagagaaatacacagaaatattaatctatatat

SEQ ID NO: 70798 - DNA, 40 bp, Homo sapiens
tatatagattaatatttctgtgtatttctctgtgccccta

SEQ ID NO: 70799 - DNA, 40 bp, Homo sapiens
taggggcacagagaaatacacagaaatattaatctatata

SEQ ID NO: 70800 - DNA, 40 bp, Homo sapiens
atatagattaatatttctgtgtatttctctgtgcccctac

SEQ ID NO: 70801 - DNA, 40 bp, Homo sapiens
gtaggggcacagagaaatacacagaaatattaatctatat

SEQ ID NO: 70802 - DNA, 40 bp, Homo sapiens
tatagattaatatttctgtgtatttctctgtgcccctact

SEQ ID NO: 70803 - DNA, 40 bp, Homo sapiens
agtaggggcacagagaaatacacagaaatattaatctata

SEQ ID NO: 70804 - DNA, 40 bp, Homo sapiens
atagattaatatttctgtgtatttctctgtgcccctactt

SEQ ID NO: 70805 - DNA, 40 bp, Homo sapiens
aagtaggggcacagagaaatacacagaaatattaatctat

SEQ ID NO: 70806 - DNA, 40 bp, Homo sapiens
tagattaatatttctgtgtatttctctgtgcccctacttt

SEQ ID NO: 70807 - DNA, 40 bp, Homo sapiens
aaagtaggggcacagagaaatacacagaaatattaatcta

SEQ ID NO: 70808 - DNA, 40 bp, Homo sapiens
agattaatatttctgtgtatttctctgtgcccctactttg

SEQ ID NO: 70809 - DNA, 40 bp, Homo sapiens
caaagtaggggcacagagaaatacacagaaatattaatct

SEQ ID NO: 70810 - DNA, 40 bp, Homo sapiens
gattaatatttctgtgtatttctctgtgcccctactttga

SEQ ID NO: 70811 - DNA, 40 bp, Homo sapiens
tcaaagtaggggcacagagaaatacacagaaatattaatc

SEQ ID NO: 70812 - DNA, 40 bp, Homo sapiens
attaatatttctgtgtatttctctgtgcccctactttgat

SEQ ID NO: 70813 - DNA, 40 bp, Homo sapiens
atcaaagtaggggcacagagaaatacacagaaatattaat

SEQ ID NO: 70814 - DNA, 40 bp, Homo sapiens
ttaatatttctgtgtatttctctgtgcccctactttgatg

SEQ ID NO: 70815 - DNA, 40 bp, Homo sapiens
catcaaagtaggggcacagagaaatacacagaaatattaa

SEQ ID NO: 70816 - DNA, 40 bp, Homo sapiens
taatatttctgtgtatttctctgtgcccctactttgatgg

SEQ ID NO: 70817 - DNA, 40 bp, Homo sapiens
ccatcaaagtaggggcacagagaaatacacagaaatatta

SEQ ID NO: 70818 - DNA, 40 bp, Homo sapiens
aatatttctgtgtatttctctgtgcccctactttgatggt

SEQ ID NO: 70819 - DNA, 40 bp, Homo sapiens
accatcaaagtaggggcacagagaaatacacagaaatatt

SEQ ID NO: 70820 - DNA, 40 bp, Homo sapiens
atatttctgtgtatttctctgtgcccctactttgatggta

SEQ ID NO: 70821 - DNA, 40 bp, Homo sapiens
taccatcaaagtaggggcacagagaaatacacagaaatat

SEQ ID NO: 70822 - DNA, 40 bp, Homo sapiens
tatttctgtgtatttctctgtgcccctactttgatggtat

SEQ ID NO: 70823 - DNA, 40 bp, Homo sapiens
ataccatcaaagtaggggcacagagaaatacacagaaata

SEQ ID NO: 70824 - DNA, 40 bp, Homo sapiens
atttctgtgtatttctctgtgcccctactttgatggtatg

SEQ ID NO: 70825 - DNA, 40 bp, Homo sapiens
cataccatcaaagtaggggcacagagaaatacacagaaat

SEQ ID NO: 70826 - DNA, 40 bp, Homo sapiens
tttctgtgtatttctctgtgcccctactttgatggtatgc

SEQ ID NO: 70827 - DNA, 40 bp, Homo sapiens
gcataccatcaaagtaggggcacagagaaatacacagaaa

SEQ ID NO: 70828 - DNA, 40 bp, Homo sapiens
ttctgtgtatttctctgtgcccctactttgatggtatgct

SEQ ID NO: 70829 - DNA, 40 bp, Homo sapiens
agcataccatcaaagtaggggcacagagaaatacacagaa

SEQ ID NO: 70830 - DNA, 40 bp, Homo sapiens
tctgtgtatttctctgtgcccctactttgatggtatgctt

SEQ ID NO: 70831 - DNA, 40 bp, Homo sapiens
aagcataccatcaaagtaggggcacagagaaatacacaga

SEQ ID NO: 70832 - DNA, 40 bp, Homo sapiens
ctgtgtatttctctgtgcccctactttgatggtatgcttt

SEQ ID NO: 70833 - DNA, 40 bp, Homo sapiens
aaagcataccatcaaagtaggggcacagagaaatacacag

SEQ ID NO: 70834 - DNA, 40 bp, Homo sapiens
tgtgtatttctctgtgcccctactttgatggtatgctttt

SEQ ID NO: 70835 - DNA, 40 bp, Homo sapiens
aaaagcataccatcaaagtaggggcacagagaaatacaca

SEQ ID NO: 70836 - DNA, 40 bp, Homo sapiens
gtgtatttctctgtgcccctactttgatggtatgcttttc

SEQ ID NO: 70837 - DNA, 40 bp, Homo sapiens
gaaaagcataccatcaaagtaggggcacagagaaatacac

SEQ ID NO: 70838 - DNA, 40 bp, Homo sapiens
tgtatttctctgtgcccctactttgatggtatgcttttct

SEQ ID NO: 70839 - DNA, 40 bp, Homo sapiens
agaaaagcataccatcaaagtaggggcacagagaaataca

SEQ ID NO: 70840 - DNA, 40 bp, Homo sapiens
gtatttctctgtgcccctactttgatggtatgcttttctg

SEQ ID NO: 70841 - DNA, 40 bp, Homo sapiens
cagaaaagcataccatcaaagtaggggcacagagaaatac

SEQ ID NO: 70842 - DNA, 40 bp, Homo sapiens
tatttctctgtgcccctactttgatggtatgcttttctga

SEQ ID NO: 70843 - DNA, 40 bp, Homo sapiens
tcagaaaagcataccatcaaagtaggggcacagagaaata

SEQ ID NO: 70844 - DNA, 40 bp, Homo sapiens
atttctctgtgcccctactttgatggtatgcttttctgaa

SEQ ID NO: 70845 - DNA, 40 bp, Homo sapiens
ttcagaaaagcataccatcaaagtaggggcacagagaaat

SEQ ID NO: 70846 - DNA, 40 bp, Homo sapiens
tttctctgtgcccctactttgatggtatgcttttctgaac

SEQ ID NO: 70847 - DNA, 40 bp, Homo sapiens
gttcagaaaagcataccatcaaagtaggggcacagagaaa

SEQ ID NO: 70848 - DNA, 40 bp, Homo sapiens
ttctctgtgcccctactttgatggtatgcttttctgaaca

SEQ ID NO: 70849 - DNA, 40 bp, Homo sapiens
tgttcagaaaagcataccatcaaagtaggggcacagagaa

SEQ ID NO: 70850 - DNA, 40 bp, Homo sapiens
tctctgtgcccctactttgatggtatgcttttctgaacaa

SEQ ID NO: 70851 - DNA, 40 bp, Homo sapiens
ttgttcagaaaagcataccatcaaagtaggggcacagaga

SEQ ID NO: 70852 - DNA, 40 bp, Homo sapiens
ctctgtgcccctactttgatggtatgcttttctgaacaaa

SEQ ID NO: 70853 - DNA, 40 bp, Homo sapiens
tttgttcagaaaagcataccatcaaagtaggggcacagag

SEQ ID NO: 70854 - DNA, 40 bp, Homo sapiens
tctgtgcccctactttgatggtatgcttttctgaacaaac

SEQ ID NO: 70855 - DNA, 40 bp, Homo sapiens
gtttgttcagaaaagcataccatcaaagtaggggcacaga

SEQ ID NO: 70856 - DNA, 40 bp, Homo sapiens
ctgtgcccctactttgatggtatgcttttctgaacaaact

SEQ ID NO: 70857 - DNA, 40 bp, Homo sapiens
agtttgttcagaaaagcataccatcaaagtaggggcacag

SEQ ID NO: 70858 - DNA, 40 bp, Homo sapiens
tgtgcccctactttgatggtatgcttttctgaacaaacta

SEQ ID NO: 70859 - DNA, 40 bp, Homo sapiens
tagtttgttcagaaaagcataccatcaaagtaggggcaca

SEQ ID NO: 70860 - DNA, 40 bp, Homo sapiens
gtgcccctactttgatggtatgcttttctgaacaaactag

SEQ ID NO: 70861 - DNA, 40 bp, Homo sapiens
ctagtttgttcagaaaagcataccatcaaagtaggggcac

SEQ ID NO: 70862 - DNA, 40 bp, Homo sapiens
tgcccctactttgatggtatgcttttctgaacaaactagc

SEQ ID NO: 70863 - DNA, 40 bp, Homo sapiens
gctagtttgttcagaaaagcataccatcaaagtaggggca

SEQ ID NO: 70864 - DNA, 40 bp, Homo sapiens
gcccctactttgatggtatgcttttctgaacaaactagca

SEQ ID NO: 70865 - DNA, 40 bp, Homo sapiens
tgctagtttgttcagaaaagcataccatcaaagtaggggc

SEQ ID NO: 70866 - DNA, 40 bp, Homo sapiens
cccctactttgatggtatgcttttctgaacaaactagcag

SEQ ID NO: 70867 - DNA, 40 bp, Homo sapiens
ctgctagtttgttcagaaaagcataccatcaaagtagggg

SEQ ID NO: 70868 - DNA, 40 bp, Homo sapiens
ccctactttgatggtatgcttttctgaacaaactagcagc

SEQ ID NO: 70869 - DNA, 40 bp, Homo sapiens
gctgctagtttgttcagaaaagcataccatcaaagtaggg

SEQ ID NO: 70870 - DNA, 40 bp, Homo sapiens
cctactttgatggtatgcttttctgaacaaactagcagca

SEQ ID NO: 70871 - DNA, 40 bp, Homo sapiens
tgctgctagtttgttcagaaaagcataccatcaaagtagg

SEQ ID NO: 70872 - DNA, 40 bp, Homo sapiens
ctactttgatggtatgcttttctgaacaaactagcagcac

SEQ ID NO: 70873 - DNA, 40 bp, Homo sapiens
gtgctgctagtttgttcagaaaagcataccatcaaagtag

SEQ ID NO: 70874 - DNA, 40 bp, Homo sapiens
tactttgatggtatgcttttctgaacaaactagcagcaca

SEQ ID NO: 70875 - DNA, 40 bp, Homo sapiens
tgtgctgctagtttgttcagaaaagcataccatcaaagta

SEQ ID NO: 70876 - DNA, 40 bp, Homo sapiens
actttgatggtatgcttttctgaacaaactagcagcacag

SEQ ID NO: 70877 - DNA, 40 bp, Homo sapiens
ctgtgctgctagtttgttcagaaaagcataccatcaaagt

SEQ ID NO: 70878 - DNA, 40 bp, Homo sapiens
ctttgatggtatgcttttctgaacaaactagcagcacagt

SEQ ID NO: 70879 - DNA, 40 bp, Homo sapiens
actgtgctgctagtttgttcagaaaagcataccatcaaag

SEQ ID NO: 70880 - DNA, 40 bp, Homo sapiens
tttgatggtatgcttttctgaacaaactagcagcacagtt

SEQ ID NO: 70881 - DNA, 40 bp, Homo sapiens
aactgtgctgctagtttgttcagaaaagcataccatcaaa

SEQ ID NO: 70882 - DNA, 40 bp, Homo sapiens
ttgatggtatgcttttctgaacaaactagcagcacagtta

SEQ ID NO: 70883 - DNA, 40 bp, Homo sapiens
taactgtgctgctagtttgttcagaaaagcataccatcaa

SEQ ID NO: 70884 - DNA, 40 bp, Homo sapiens
tgatggtatgcttttctgaacaaactagcagcacagttaa

SEQ ID NO: 70885 - DNA, 40 bp, Homo sapiens
ttaactgtgctgctagtttgttcagaaaagcataccatca

SEQ ID NO: 70886 - DNA, 40 bp, Homo sapiens
gatggtatgcttttctgaacaaactagcagcacagttaac

SEQ ID NO: 70887 - DNA, 40 bp, Homo sapiens
gttaactgtgctgctagtttgttcagaaaagcataccatc

SEQ ID NO: 70888 - DNA, 40 bp, Homo sapiens
atggtatgcttttctgaacaaactagcagcacagttaact

SEQ ID NO: 70889 - DNA, 40 bp, Homo sapiens
agttaactgtgctgctagtttgttcagaaaagcataccat

SEQ ID NO: 70890 - DNA, 40 bp, Homo sapiens
tggtatgcttttctgaacaaactagcagcacagttaacta

SEQ ID NO: 70891 - DNA, 40 bp, Homo sapiens
tagttaactgtgctgctagtttgttcagaaaagcatacca

SEQ ID NO: 70892 - DNA, 40 bp, Homo sapiens
ggtatgcttttctgaacaaactagcagcacagttaactaa

SEQ ID NO: 70893 - DNA, 40 bp, Homo sapiens
ttagttaactgtgctgctagtttgttcagaaaagcatacc

SEQ ID NO: 70894 - DNA, 40 bp, Homo sapiens
gtatgcttttctgaacaaactagcagcacagttaactaag

SEQ ID NO: 70895 - DNA, 40 bp, Homo sapiens
cttagttaactgtgctgctagtttgttcagaaaagcatac

SEQ ID NO: 70896 - DNA, 40 bp, Homo sapiens
tatgcttttctgaacaaactagcagcacagttaactaagc

SEQ ID NO: 70897 - DNA, 40 bp, Homo sapiens
gcttagttaactgtgctgctagtttgttcagaaaagcata

SEQ ID NO: 70898 - DNA, 40 bp, Homo sapiens
atgcttttctgaacaaactagcagcacagttaactaagca

SEQ ID NO: 70899 - DNA, 40 bp, Homo sapiens
tgcttagttaactgtgctgctagtttgttcagaaaagcat

SEQ ID NO: 70900 - DNA, 40 bp, Homo sapiens
tgcttttctgaacaaactagcagcacagttaactaagcac

SEQ ID NO: 70901 - DNA, 40 bp, Homo sapiens
gtgcttagttaactgtgctgctagtttgttcagaaaagca

SEQ ID NO: 70902 - DNA, 40 bp, Homo sapiens
gcttttctgaacaaactagcagcacagttaactaagcact

SEQ ID NO: 70903 - DNA, 40 bp, Homo sapiens
agtgcttagttaactgtgctgctagtttgttcagaaaagc

SEQ ID NO: 70904 - DNA, 40 bp, Homo sapiens
cttttctgaacaaactagcagcacagttaactaagcactt

SEQ ID NO: 70905 - DNA, 40 bp, Homo sapiens
aagtgcttagttaactgtgctgctagtttgttcagaaaag

SEQ ID NO: 70906 - DNA, 40 bp, Homo sapiens
ttttctgaacaaactagcagcacagttaactaagcacttt

SEQ ID NO: 70907 - DNA, 40 bp, Homo sapiens
aaagtgcttagttaactgtgctgctagtttgttcagaaaa

SEQ ID NO: 70908 - DNA, 40 bp, Homo sapiens
tttctgaacaaactagcagcacagttaactaagcactttg

SEQ ID NO: 70909 - DNA, 40 bp, Homo sapiens
caaagtgcttagttaactgtgctgctagtttgttcagaaa

SEQ ID NO: 70910 - DNA, 40 bp, Homo sapiens
ttctgaacaaactagcagcacagttaactaagcactttgc

SEQ ID NO: 70911 - DNA, 40 bp, Homo sapiens
gcaaagtgcttagttaactgtgctgctagtttgttcagaa

SEQ ID NO: 70912 - DNA, 40 bp, Homo sapiens
tctgaacaaactagcagcacagttaactaagcactttgcc

SEQ ID NO: 70913 - DNA, 40 bp, Homo sapiens
ggcaaagtgcttagttaactgtgctgctagtttgttcaga

SEQ ID NO: 70914 - DNA, 40 bp, Homo sapiens
ctgaacaaactagcagcacagttaactaagcactttgccc

SEQ ID NO: 70915 - DNA, 40 bp, Homo sapiens
gggcaaagtgcttagttaactgtgctgctagtttgttcag

SEQ ID NO: 70916 - DNA, 40 bp, Homo sapiens
tgaacaaactagcagcacagttaactaagcactttgcccc

SEQ ID NO: 70917 - DNA, 40 bp, Homo sapiens
ggggcaaagtgcttagttaactgtgctgctagtttgttca

SEQ ID NO: 70918 - DNA, 40 bp, Homo sapiens
gaacaaactagcagcacagttaactaagcactttgccccg

SEQ ID NO: 70919 - DNA, 40 bp, Homo sapiens
cggggcaaagtgcttagttaactgtgctgctagtttgttc

SEQ ID NO: 70920 - DNA, 40 bp, Homo sapiens
aacaaactagcagcacagttaactaagcactttgccccgt

SEQ ID NO: 70921 - DNA, 40 bp, Homo sapiens
acggggcaaagtgcttagttaactgtgctgctagtttgtt

SEQ ID NO: 70922 - DNA, 40 bp, Homo sapiens
acaaactagcagcacagttaactaagcactttgccccgtt

SEQ ID NO: 70923 - DNA, 40 bp, Homo sapiens
aacggggcaaagtgcttagttaactgtgctgctagtttgt

SEQ ID NO: 70924 - DNA, 40 bp, Homo sapiens
caaactagcagcacagttaactaagcactttgccccgttt

SEQ ID NO: 70925 - DNA, 40 bp, Homo sapiens
aaacggggcaaagtgcttagttaactgtgctgctagtttg

SEQ ID NO: 70926 - DNA, 40 bp, Homo sapiens
aaactagcagcacagttaactaagcactttgccccgtttg

SEQ ID NO: 70927 - DNA, 40 bp, Homo sapiens
caaacggggcaaagtgcttagttaactgtgctgctagttt

SEQ ID NO: 70928 - DNA, 40 bp, Homo sapiens
aactagcagcacagttaactaagcactttgccccgtttga

SEQ ID NO: 70929 - DNA, 40 bp, Homo sapiens
tcaaacggggcaaagtgcttagttaactgtgctgctagtt

SEQ ID NO: 70930 - DNA, 40 bp, Homo sapiens
actagcagcacagttaactaagcactttgccccgtttgat

SEQ ID NO: 70931 - DNA, 40 bp, Homo sapiens
atcaaacggggcaaagtgcttagttaactgtgctgctagt

SEQ ID NO: 70932 - DNA, 40 bp, Homo sapiens
ctagcagcacagttaactaagcactttgccccgtttgatg

SEQ ID NO: 70933 - DNA, 40 bp, Homo sapiens
catcaaacggggcaaagtgcttagttaactgtgctgctag

SEQ ID NO: 70934 - DNA, 40 bp, Homo sapiens
tagcagcacagttaactaagcactttgccccgtttgatga

SEQ ID NO: 70935 - DNA, 40 bp, Homo sapiens
tcatcaaacggggcaaagtgcttagttaactgtgctgcta

SEQ ID NO: 70936 - DNA, 40 bp, Homo sapiens
agcagcacagttaactaagcactttgccccgtttgatgac

SEQ ID NO: 70937 - DNA, 40 bp, Homo sapiens
gtcatcaaacggggcaaagtgcttagttaactgtgctgct

SEQ ID NO: 70938 - DNA, 40 bp, Homo sapiens
gcagcacagttaactaagcactttgccccgtttgatgact

SEQ ID NO: 70939 - DNA, 40 bp, Homo sapiens
agtcatcaaacggggcaaagtgcttagttaactgtgctgc

SEQ ID NO: 70940 - DNA, 40 bp, Homo sapiens
cagcacagttaactaagcactttgccccgtttgatgactg

SEQ ID NO: 70941 - DNA, 40 bp, Homo sapiens
cagtcatcaaacggggcaaagtgcttagttaactgtgctg

SEQ ID NO: 70942 - DNA, 40 bp, Homo sapiens
agcacagttaactaagcactttgccccgtttgatgactgc

SEQ ID NO: 70943 - DNA, 40 bp, Homo sapiens
gcagtcatcaaacggggcaaagtgcttagttaactgtgct

SEQ ID NO: 70944 - DNA, 40 bp, Homo sapiens
gcacagttaactaagcactttgccccgtttgatgactgcc

SEQ ID NO: 70945 - DNA, 40 bp, Homo sapiens
ggcagtcatcaaacggggcaaagtgcttagttaactgtgc

SEQ ID NO: 70946 - DNA, 40 bp, Homo sapiens
cacagttaactaagcactttgccccgtttgatgactgcct

SEQ ID NO: 70947 - DNA, 40 bp, Homo sapiens
aggcagtcatcaaacggggcaaagtgcttagttaactgtg

SEQ ID NO: 70948 - DNA, 40 bp, Homo sapiens
acagttaactaagcactttgccccgtttgatgactgccta

SEQ ID NO: 70949 - DNA, 40 bp, Homo sapiens
taggcagtcatcaaacggggcaaagtgcttagttaactgt

SEQ ID NO: 70950 - DNA, 40 bp, Homo sapiens
cagttaactaagcactttgccccgtttgatgactgcctaa

SEQ ID NO: 70951 - DNA, 40 bp, Homo sapiens
ttaggcagtcatcaaacggggcaaagtgcttagttaactg

SEQ ID NO: 70952 - DNA, 40 bp, Homo sapiens
agttaactaagcactttgccccgtttgatgactgcctaat

SEQ ID NO: 70953 - DNA, 40 bp, Homo sapiens
attaggcagtcatcaaacggggcaaagtgcttagttaact

SEQ ID NO: 70954 - DNA, 40 bp, Homo sapiens
gttaactaagcactttgccccgtttgatgactgcctaatt

SEQ ID NO: 70955 - DNA, 40 bp, Homo sapiens
aattaggcagtcatcaaacggggcaaagtgcttagttaac

SEQ ID NO: 70956 - DNA, 40 bp, Homo sapiens
ttaactaagcactttgccccgtttgatgactgcctaattt

SEQ ID NO: 70957 - DNA, 40 bp, Homo sapiens
aaattaggcagtcatcaaacggggcaaagtgcttagttaa

SEQ ID NO: 70958 - DNA, 40 bp, Homo sapiens
taactaagcactttgccccgtttgatgactgcctaatttt

SEQ ID NO: 70959 - DNA, 40 bp, Homo sapiens
aaaattaggcagtcatcaaacggggcaaagtgcttagtta

SEQ ID NO: 70960 - DNA, 40 bp, Homo sapiens
aactaagcactttgccccgtttgatgactgcctaattttc

SEQ ID NO: 70961 - DNA, 40 bp, Homo sapiens
gaaaattaggcagtcatcaaacggggcaaagtgcttagtt

SEQ ID NO: 70962 - DNA, 40 bp, Homo sapiens
actaagcactttgccccgtttgatgactgcctaattttct

SEQ ID NO: 70963 - DNA, 40 bp, Homo sapiens
agaaaattaggcagtcatcaaacggggcaaagtgcttagt

SEQ ID NO: 70964 - DNA, 40 bp, Homo sapiens
ctaagcactttgccccgtttgatgactgcctaattttcta

SEQ ID NO: 70965 - DNA, 40 bp, Homo sapiens
tagaaaattaggcagtcatcaaacggggcaaagtgcttag

SEQ ID NO: 70966 - DNA, 40 bp, Homo sapiens
taagcactttgccccgtttgatgactgcctaattttctag

SEQ ID NO: 70967 - DNA, 40 bp, Homo sapiens
ctagaaaattaggcagtcatcaaacggggcaaagtgctta

SEQ ID NO: 70968 - DNA, 40 bp, Homo sapiens
aagcactttgccccgtttgatgactgcctaattttctaga

SEQ ID NO: 70969 - DNA, 40 bp, Homo sapiens
tctagaaaattaggcagtcatcaaacggggcaaagtgctt

SEQ ID NO: 70970 - DNA, 40 bp, Homo sapiens
agcactttgccccgtttgatgactgcctaattttctagat

SEQ ID NO: 70971 - DNA, 40 bp, Homo sapiens
atctagaaaattaggcagtcatcaaacggggcaaagtgct

SEQ ID NO: 70972 - DNA, 40 bp, Homo sapiens
gcactttgccccgtttgatgactgcctaattttctagatt

SEQ ID NO: 70973 - DNA, 40 bp, Homo sapiens
aatctagaaaattaggcagtcatcaaacggggcaaagtgc

SEQ ID NO: 70974 - DNA, 40 bp, Homo sapiens
cactttgccccgtttgatgactgcctaattttctagattg

SEQ ID NO: 70975 - DNA, 40 bp, Homo sapiens
caatctagaaaattaggcagtcatcaaacggggcaaagtg

SEQ ID NO: 70976 - DNA, 40 bp, Homo sapiens
actttgccccgtttgatgactgcctaattttctagattgg

SEQ ID NO: 70977 - DNA, 40 bp, Homo sapiens
ccaatctagaaaattaggcagtcatcaaacggggcaaagt

SEQ ID NO: 70978 - DNA, 40 bp, Homo sapiens
ctttgccccgtttgatgactgcctaattttctagattgga

SEQ ID NO: 70979 - DNA, 40 bp, Homo sapiens
tccaatctagaaaattaggcagtcatcaaacggggcaaag

SEQ ID NO: 70980 - DNA, 40 bp, Homo sapiens
tttgccccgtttgatgactgcctaattttctagattggaa

SEQ ID NO: 70981 - DNA, 40 bp, Homo sapiens
ttccaatctagaaaattaggcagtcatcaaacggggcaaa

SEQ ID NO: 70982 - DNA, 40 bp, Homo sapiens
ttgccccgtttgatgactgcctaattttctagattggaaa

SEQ ID NO: 70983 - DNA, 40 bp, Homo sapiens
tttccaatctagaaaattaggcagtcatcaaacggggcaa

SEQ ID NO: 70984 - DNA, 40 bp, Homo sapiens
tgccccgtttgatgactgcctaattttctagattggaaaa

SEQ ID NO: 70985 - DNA, 40 bp, Homo sapiens
ttttccaatctagaaaattaggcagtcatcaaacggggca

SEQ ID NO: 70986 - DNA, 40 bp, Homo sapiens
gccccgtttgatgactgcctaattttctagattggaaaat

SEQ ID NO: 70987 - DNA, 40 bp, Homo sapiens
attttccaatctagaaaattaggcagtcatcaaacggggc

SEQ ID NO: 70988 - DNA, 40 bp, Homo sapiens
ccccgtttgatgactgcctaattttctagattggaaaata

SEQ ID NO: 70989 - DNA, 40 bp, Homo sapiens
tattttccaatctagaaaattaggcagtcatcaaacgggg

SEQ ID NO: 70990 - DNA, 40 bp, Homo sapiens
cccgtttgatgactgcctaattttctagattggaaaatat

SEQ ID NO: 70991 - DNA, 40 bp, Homo sapiens
atattttccaatctagaaaattaggcagtcatcaaacggg

SEQ ID NO: 70992 - DNA, 40 bp, Homo sapiens
ccgtttgatgactgcctaattttctagattggaaaatatt

SEQ ID NO: 70993 - DNA, 40 bp, Homo sapiens
aatattttccaatctagaaaattaggcagtcatcaaacgg

SEQ ID NO: 70994 - DNA, 40 bp, Homo sapiens
cgtttgatgactgcctaattttctagattggaaaatatta

SEQ ID NO: 70995 - DNA, 40 bp, Homo sapiens
taatattttccaatctagaaaattaggcagtcatcaaacg

SEQ ID NO: 70996 - DNA, 40 bp, Homo sapiens
gtttgatgactgcctaattttctagattggaaaatattaa

SEQ ID NO: 70997 - DNA, 40 bp, Homo sapiens
ttaatattttccaatctagaaaattaggcagtcatcaaac

SEQ ID NO: 70998 - DNA, 40 bp, Homo sapiens
tttgatgactgcctaattttctagattggaaaatattaaa

SEQ ID NO: 70999 - DNA, 40 bp, Homo sapiens
tttaatattttccaatctagaaaattaggcagtcatcaaa

SEQ ID NO: 71000 - DNA, 40 bp, Homo sapiens
ttgatgactgcctaattttctagattggaaaatattaaaa

SEQ ID NO: 71001 - DNA, 40 bp, Homo sapiens
ttttaatattttccaatctagaaaattaggcagtcatcaa

SEQ ID NO: 71002 - DNA, 40 bp, Homo sapiens
tgatgactgcctaattttctagattggaaaatattaaaaa

SEQ ID NO: 71003 - DNA, 40 bp, Homo sapiens
tttttaatattttccaatctagaaaattaggcagtcatca

SEQ ID NO: 71004 - DNA, 40 bp, Homo sapiens
gatgactgcctaattttctagattggaaaatattaaaaac

SEQ ID NO: 71005 - DNA, 40 bp, Homo sapiens
gtttttaatattttccaatctagaaaattaggcagtcatc

SEQ ID NO: 71006 - DNA, 40 bp, Homo sapiens
atgactgcctaattttctagattggaaaatattaaaaact

SEQ ID NO: 71007 - DNA, 40 bp, Homo sapiens
agtttttaatattttccaatctagaaaattaggcagtcat

SEQ ID NO: 71008 - DNA, 40 bp, Homo sapiens
tgactgcctaattttctagattggaaaatattaaaaactt

SEQ ID NO: 71009 - DNA, 40 bp, Homo sapiens
aagtttttaatattttccaatctagaaaattaggcagtca

SEQ ID NO: 71010 - DNA, 40 bp, Homo sapiens
gactgcctaattttctagattggaaaatattaaaaacttt

SEQ ID NO: 71011 - DNA, 40 bp, Homo sapiens
aaagtttttaatattttccaatctagaaaattaggcagtc

SEQ ID NO: 71012 - DNA, 40 bp, Homo sapiens
actgcctaattttctagattggaaaatattaaaaactttt

SEQ ID NO: 71013 - DNA, 40 bp, Homo sapiens
aaaagtttttaatattttccaatctagaaaattaggcagt

SEQ ID NO: 71014 - DNA, 40 bp, Homo sapiens
ctgcctaattttctagattggaaaatattaaaaactttta

SEQ ID NO: 71015 - DNA, 40 bp, Homo sapiens
taaaagtttttaatattttccaatctagaaaattaggcag

SEQ ID NO: 71016 - DNA, 40 bp, Homo sapiens
tgcctaattttctagattggaaaatattaaaaacttttat

SEQ ID NO: 71017 - DNA, 40 bp, Homo sapiens
ataaaagtttttaatattttccaatctagaaaattaggca

SEQ ID NO: 71018 - DNA, 40 bp, Homo sapiens
gcctaattttctagattggaaaatattaaaaacttttatc

SEQ ID NO: 71019 - DNA, 40 bp, Homo sapiens
gataaaagtttttaatattttccaatctagaaaattaggc

SEQ ID NO: 71020 - DNA, 40 bp, Homo sapiens
cctaattttctagattggaaaatattaaaaacttttatct

SEQ ID NO: 71021 - DNA, 40 bp, Homo sapiens
agataaaagtttttaatattttccaatctagaaaattagg

SEQ ID NO: 71022 - DNA, 40 bp, Homo sapiens
ctaattttctagattggaaaatattaaaaacttttatctc

SEQ ID NO: 71023 - DNA, 40 bp, Homo sapiens
gagataaaagtttttaatattttccaatctagaaaattag

SEQ ID NO: 71024 - DNA, 40 bp, Homo sapiens
taattttctagattggaaaatattaaaaacttttatctcc

SEQ ID NO: 71025 - DNA, 40 bp, Homo sapiens
ggagataaaagtttttaatattttccaatctagaaaatta

SEQ ID NO: 71026 - DNA, 40 bp, Homo sapiens
aattttctagattggaaaatattaaaaacttttatctcca

SEQ ID NO: 71027 - DNA, 40 bp, Homo sapiens
tggagataaaagtttttaatattttccaatctagaaaatt

SEQ ID NO: 71028 - DNA, 40 bp, Homo sapiens
attttctagattggaaaatattaaaaacttttatctccat

SEQ ID NO: 71029 - DNA, 40 bp, Homo sapiens
atggagataaaagtttttaatattttccaatctagaaaat

SEQ ID NO: 71030 - DNA, 40 bp, Homo sapiens
ttttctagattggaaaatattaaaaacttttatctccata

SEQ ID NO: 71031 - DNA, 40 bp, Homo sapiens
tatggagataaaagtttttaatattttccaatctagaaaa

SEQ ID NO: 71032 - DNA, 40 bp, Homo sapiens
tttctagattggaaaatattaaaaacttttatctccatat

SEQ ID NO: 71033 - DNA, 40 bp, Homo sapiens
atatggagataaaagtttttaatattttccaatctagaaa

SEQ ID NO: 71034 - DNA, 40 bp, Homo sapiens
ttctagattggaaaatattaaaaacttttatctccatatg

SEQ ID NO: 71035 - DNA, 40 bp, Homo sapiens
catatggagataaaagtttttaatattttccaatctagaa

SEQ ID NO: 71036 - DNA, 40 bp, Homo sapiens
tctagattggaaaatattaaaaacttttatctccatatgg

SEQ ID NO: 71037 - DNA, 40 bp, Homo sapiens
ccatatggagataaaagtttttaatattttccaatctaga

SEQ ID NO: 71038 - DNA, 40 bp, Homo sapiens
ctagattggaaaatattaaaaacttttatctccatatggc

SEQ ID NO: 71039 - DNA, 40 bp, Homo sapiens
gccatatggagataaaagtttttaatattttccaatctag

SEQ ID NO: 71040 - DNA, 40 bp, Homo sapiens
tagattggaaaatattaaaaacttttatctccatatggcc

SEQ ID NO: 71041 - DNA, 40 bp, Homo sapiens
ggccatatggagataaaagtttttaatattttccaatcta

SEQ ID NO: 71042 - DNA, 40 bp, Homo sapiens
agattggaaaatattaaaaacttttatctccatatggcca

SEQ ID NO: 71043 - DNA, 40 bp, Homo sapiens
tggccatatggagataaaagtttttaatattttccaatct

SEQ ID NO: 71044 - DNA, 40 bp, Homo sapiens
gattggaaaatattaaaaacttttatctccatatggccaa

SEQ ID NO: 71045 - DNA, 40 bp, Homo sapiens
ttggccatatggagataaaagtttttaatattttccaatc

SEQ ID NO: 71046 - DNA, 40 bp, Homo sapiens
attggaaaatattaaaaacttttatctccatatggccaat

SEQ ID NO: 71047 - DNA, 40 bp, Homo sapiens
attggccatatggagataaaagtttttaatattttccaat

SEQ ID NO: 71048 - DNA, 40 bp, Homo sapiens
ttggaaaatattaaaaacttttatctccatatggccaata

SEQ ID NO: 71049 - DNA, 40 bp, Homo sapiens
tattggccatatggagataaaagtttttaatattttccaa

SEQ ID NO: 71050 - DNA, 40 bp, Homo sapiens
tggaaaatattaaaaacttttatctccatatggccaatat

SEQ ID NO: 71051 - DNA, 40 bp, Homo sapiens
atattggccatatggagataaaagtttttaatattttcca

SEQ ID NO: 71052 - DNA, 40 bp, Homo sapiens
ggaaaatattaaaaacttttatctccatatggccaatata

SEQ ID NO: 71053 - DNA, 40 bp, Homo sapiens
tatattggccatatggagataaaagtttttaatattttcc

SEQ ID NO: 71054 - DNA, 40 bp, Homo sapiens
gaaaatattaaaaacttttatctccatatggccaatatat

SEQ ID NO: 71055 - DNA, 40 bp, Homo sapiens
atatattggccatatggagataaaagtttttaatattttc

SEQ ID NO: 71056 - DNA, 40 bp, Homo sapiens
aaaatattaaaaacttttatctccatatggccaatatatg

SEQ ID NO: 71057 - DNA, 40 bp, Homo sapiens
catatattggccatatggagataaaagtttttaatatttt

SEQ ID NO: 71058 - DNA, 40 bp, Homo sapiens
aaatattaaaaacttttatctccatatggccaatatatga

SEQ ID NO: 71059 - DNA, 40 bp, Homo sapiens
tcatatattggccatatggagataaaagtttttaatattt

SEQ ID NO: 71060 - DNA, 40 bp, Homo sapiens
aatattaaaaacttttatctccatatggccaatatatgat

SEQ ID NO: 71061 - DNA, 40 bp, Homo sapiens
atcatatattggccatatggagataaaagtttttaatatt

SEQ ID NO: 71062 - DNA, 40 bp, Homo sapiens
atattaaaaacttttatctccatatggccaatatatgatt

SEQ ID NO: 71063 - DNA, 40 bp, Homo sapiens
aatcatatattggccatatggagataaaagtttttaatat

SEQ ID NO: 71064 - DNA, 40 bp, Homo sapiens
tattaaaaacttttatctccatatggccaatatatgattg

SEQ ID NO: 71065 - DNA, 40 bp, Homo sapiens
caatcatatattggccatatggagataaaagtttttaata

SEQ ID NO: 71066 - DNA, 40 bp, Homo sapiens
attaaaaacttttatctccatatggccaatatatgattgt

SEQ ID NO: 71067 - DNA, 40 bp, Homo sapiens
acaatcatatattggccatatggagataaaagtttttaat

SEQ ID NO: 71068 - DNA, 40 bp, Homo sapiens
ttaaaaacttttatctccatatggccaatatatgattgta

SEQ ID NO: 71069 - DNA, 40 bp, Homo sapiens
tacaatcatatattggccatatggagataaaagtttttaa

SEQ ID NO: 71070 - DNA, 40 bp, Homo sapiens
taaaaacttttatctccatatggccaatatatgattgtac

SEQ ID NO: 71071 - DNA, 40 bp, Homo sapiens
gtacaatcatatattggccatatggagataaaagttttta

SEQ ID NO: 71072 - DNA, 40 bp, Homo sapiens
aaaaacttttatctccatatggccaatatatgattgtacc

SEQ ID NO: 71073 - DNA, 40 bp, Homo sapiens
ggtacaatcatatattggccatatggagataaaagttttt

SEQ ID NO: 71074 - DNA, 40 bp, Homo sapiens
aaaacttttatctccatatggccaatatatgattgtacct

SEQ ID NO: 71075 - DNA, 40 bp, Homo sapiens
aggtacaatcatatattggccatatggagataaaagtttt

SEQ ID NO: 71076 - DNA, 40 bp, Homo sapiens
aaacttttatctccatatggccaatatatgattgtacctg

SEQ ID NO: 71077 - DNA, 40 bp, Homo sapiens
caggtacaatcatatattggccatatggagataaaagttt

SEQ ID NO: 71078 - DNA, 40 bp, Homo sapiens
aacttttatctccatatggccaatatatgattgtacctgt

SEQ ID NO: 71079 - DNA, 40 bp, Homo sapiens
acaggtacaatcatatattggccatatggagataaaagtt

SEQ ID NO: 71080 - DNA, 40 bp, Homo sapiens
acttttatctccatatggccaatatatgattgtacctgtt

SEQ ID NO: 71081 - DNA, 40 bp, Homo sapiens
aacaggtacaatcatatattggccatatggagataaaagt

SEQ ID NO: 71082 - DNA, 40 bp, Homo sapiens
cttttatctccatatggccaatatatgattgtacctgttg

SEQ ID NO: 71083 - DNA, 40 bp, Homo sapiens
caacaggtacaatcatatattggccatatggagataaaag

SEQ ID NO: 71084 - DNA, 40 bp, Homo sapiens
ttttatctccatatggccaatatatgattgtacctgttgt

SEQ ID NO: 71085 - DNA, 40 bp, Homo sapiens
acaacaggtacaatcatatattggccatatggagataaaa

SEQ ID NO: 71086 - DNA, 40 bp, Homo sapiens
tttatctccatatggccaatatatgattgtacctgttgtc

SEQ ID NO: 71087 - DNA, 40 bp, Homo sapiens
gacaacaggtacaatcatatattggccatatggagataaa

SEQ ID NO: 71088 - DNA, 40 bp, Homo sapiens
ttatctccatatggccaatatatgattgtacctgttgtca

SEQ ID NO: 71089 - DNA, 40 bp, Homo sapiens
tgacaacaggtacaatcatatattggccatatggagataa

SEQ ID NO: 71090 - DNA, 40 bp, Homo sapiens
tatctccatatggccaatatatgattgtacctgttgtcat

SEQ ID NO: 71091 - DNA, 40 bp, Homo sapiens
atgacaacaggtacaatcatatattggccatatggagata

SEQ ID NO: 71092 - DNA, 40 bp, Homo sapiens
atctccatatggccaatatatgattgtacctgttgtcata

SEQ ID NO: 71093 - DNA, 40 bp, Homo sapiens
tatgacaacaggtacaatcatatattggccatatggagat

SEQ ID NO: 71094 - DNA, 40 bp, Homo sapiens
tctccatatggccaatatatgattgtacctgttgtcatag

SEQ ID NO: 71095 - DNA, 40 bp, Homo sapiens
ctatgacaacaggtacaatcatatattggccatatggaga

SEQ ID NO: 71096 - DNA, 40 bp, Homo sapiens
ctccatatggccaatatatgattgtacctgttgtcatagc

SEQ ID NO: 71097 - DNA, 40 bp, Homo sapiens
gctatgacaacaggtacaatcatatattggccatatggag

SEQ ID NO: 71098 - DNA, 40 bp, Homo sapiens
tccatatggccaatatatgattgtacctgttgtcatagct

SEQ ID NO: 71099 - DNA, 40 bp, Homo sapiens
agctatgacaacaggtacaatcatatattggccatatgga

SEQ ID NO: 71100 - DNA, 40 bp, Homo sapiens
ccatatggccaatatatgattgtacctgttgtcatagctc

SEQ ID NO: 71101 - DNA, 40 bp, Homo sapiens
gagctatgacaacaggtacaatcatatattggccatatgg

SEQ ID NO: 71102 - DNA, 40 bp, Homo sapiens
catatggccaatatatgattgtacctgttgtcatagctct

SEQ ID NO: 71103 - DNA, 40 bp, Homo sapiens
agagctatgacaacaggtacaatcatatattggccatatg

SEQ ID NO: 71104 - DNA, 40 bp, Homo sapiens
atatggccaatatatgattgtacctgttgtcatagctctc

SEQ ID NO: 71105 - DNA, 40 bp, Homo sapiens
gagagctatgacaacaggtacaatcatatattggccatat

SEQ ID NO: 71106 - DNA, 40 bp, Homo sapiens
tatggccaatatatgattgtacctgttgtcatagctctct

SEQ ID NO: 71107 - DNA, 40 bp, Homo sapiens
agagagctatgacaacaggtacaatcatatattggccata

SEQ ID NO: 71108 - DNA, 40 bp, Homo sapiens
atggccaatatatgattgtacctgttgtcatagctctctt

SEQ ID NO: 71109 - DNA, 40 bp, Homo sapiens
aagagagctatgacaacaggtacaatcatatattggccat

SEQ ID NO: 71110 - DNA, 40 bp, Homo sapiens
tggccaatatatgattgtacctgttgtcatagctctctta

SEQ ID NO: 71111 - DNA, 40 bp, Homo sapiens
taagagagctatgacaacaggtacaatcatatattggcca

SEQ ID NO: 71112 - DNA, 40 bp, Homo sapiens
ggccaatatatgattgtacctgttgtcatagctctcttat

SEQ ID NO: 71113 - DNA, 40 bp, Homo sapiens
ataagagagctatgacaacaggtacaatcatatattggcc

SEQ ID NO: 71114 - DNA, 40 bp, Homo sapiens
gccaatatatgattgtacctgttgtcatagctctcttatg

SEQ ID NO: 71115 - DNA, 40 bp, Homo sapiens
cataagagagctatgacaacaggtacaatcatatattggc

SEQ ID NO: 71116 - DNA, 40 bp, Homo sapiens
ccaatatatgattgtacctgttgtcatagctctcttatgt

SEQ ID NO: 71117 - DNA, 40 bp, Homo sapiens
acataagagagctatgacaacaggtacaatcatatattgg

SEQ ID NO: 71118 - DNA, 40 bp, Homo sapiens
caatatatgattgtacctgttgtcatagctctcttatgtt

SEQ ID NO: 71119 - DNA, 40 bp, Homo sapiens
aacataagagagctatgacaacaggtacaatcatatattg

SEQ ID NO: 71120 - DNA, 40 bp, Homo sapiens
aatatatgattgtacctgttgtcatagctctcttatgttt

SEQ ID NO: 71121 - DNA, 40 bp, Homo sapiens
aaacataagagagctatgacaacaggtacaatcatatatt

SEQ ID NO: 71122 - DNA, 40 bp, Homo sapiens
atatatgattgtacctgttgtcatagctctcttatgttta

SEQ ID NO: 71123 - DNA, 40 bp, Homo sapiens
taaacataagagagctatgacaacaggtacaatcatatat

SEQ ID NO: 71124 - DNA, 40 bp, Homo sapiens
tatatgattgtacctgttgtcatagctctcttatgtttaa

SEQ ID NO: 71125 - DNA, 40 bp, Homo sapiens
ttaaacataagagagctatgacaacaggtacaatcatata

SEQ ID NO: 71126 - DNA, 40 bp, Homo sapiens
atatgattgtacctgttgtcatagctctcttatgtttaag

SEQ ID NO: 71127 - DNA, 40 bp, Homo sapiens
cttaaacataagagagctatgacaacaggtacaatcatat

SEQ ID NO: 71128 - DNA, 40 bp, Homo sapiens
tatgattgtacctgttgtcatagctctcttatgtttaagc

SEQ ID NO: 71129 - DNA, 40 bp, Homo sapiens
gcttaaacataagagagctatgacaacaggtacaatcata

SEQ ID NO: 71130 - DNA, 40 bp, Homo sapiens
atgattgtacctgttgtcatagctctcttatgtttaagca

SEQ ID NO: 71131 - DNA, 40 bp, Homo sapiens
tgcttaaacataagagagctatgacaacaggtacaatcat

SEQ ID NO: 71132 - DNA, 40 bp, Homo sapiens
tgattgtacctgttgtcatagctctcttatgtttaagcaa

SEQ ID NO: 71133 - DNA, 40 bp, Homo sapiens
ttgcttaaacataagagagctatgacaacaggtacaatca

SEQ ID NO: 71134 - DNA, 40 bp, Homo sapiens
gattgtacctgttgtcatagctctcttatgtttaagcaag

SEQ ID NO: 71135 - DNA, 40 bp, Homo sapiens
cttgcttaaacataagagagctatgacaacaggtacaatc

SEQ ID NO: 71136 - DNA, 40 bp, Homo sapiens
attgtacctgttgtcatagctctcttatgtttaagcaaga

SEQ ID NO: 71137 - DNA, 40 bp, Homo sapiens
tcttgcttaaacataagagagctatgacaacaggtacaat

SEQ ID NO: 71138 - DNA, 40 bp, Homo sapiens
ttgtacctgttgtcatagctctcttatgtttaagcaagaa

SEQ ID NO: 71139 - DNA, 40 bp, Homo sapiens
ttcttgcttaaacataagagagctatgacaacaggtacaa

SEQ ID NO: 71140 - DNA, 40 bp, Homo sapiens
tgtacctgttgtcatagctctcttatgtttaagcaagaaa

SEQ ID NO: 71141 - DNA, 40 bp, Homo sapiens
tttcttgcttaaacataagagagctatgacaacaggtaca

SEQ ID NO: 71142 - DNA, 40 bp, Homo sapiens
gtacctgttgtcatagctctcttatgtttaagcaagaaaa

SEQ ID NO: 71143 - DNA, 40 bp, Homo sapiens
ttttcttgcttaaacataagagagctatgacaacaggtac

SEQ ID NO: 71144 - DNA, 40 bp, Homo sapiens
tacctgttgtcatagctctcttatgtttaagcaagaaaaa

SEQ ID NO: 71145 - DNA, 40 bp, Homo sapiens
tttttcttgcttaaacataagagagctatgacaacaggta

SEQ ID NO: 71146 - DNA, 40 bp, Homo sapiens
acctgttgtcatagctctcttatgtttaagcaagaaaaac

SEQ ID NO: 71147 - DNA, 40 bp, Homo sapiens
gtttttcttgcttaaacataagagagctatgacaacaggt

SEQ ID NO: 71148 - DNA, 40 bp, Homo sapiens
cctgttgtcatagctctcttatgtttaagcaagaaaaacc

SEQ ID NO: 71149 - DNA, 40 bp, Homo sapiens
ggtttttcttgcttaaacataagagagctatgacaacagg

SEQ ID NO: 71150 - DNA, 40 bp, Homo sapiens
ctgttgtcatagctctcttatgtttaagcaagaaaaaccc

SEQ ID NO: 71151 - DNA, 40 bp, Homo sapiens
gggtttttcttgcttaaacataagagagctatgacaacag

SEQ ID NO: 71152 - DNA, 40 bp, Homo sapiens
tgttgtcatagctctcttatgtttaagcaagaaaaaccct

SEQ ID NO: 71153 - DNA, 40 bp, Homo sapiens
agggtttttcttgcttaaacataagagagctatgacaaca

SEQ ID NO: 71154 - DNA, 40 bp, Homo sapiens
gttgtcatagctctcttatgtttaagcaagaaaaacccta

SEQ ID NO: 71155 - DNA, 40 bp, Homo sapiens
tagggtttttcttgcttaaacataagagagctatgacaac

SEQ ID NO: 71156 - DNA, 40 bp, Homo sapiens
ttgtcatagctctcttatgtttaagcaagaaaaaccctat

SEQ ID NO: 71157 - DNA, 40 bp, Homo sapiens
atagggtttttcttgcttaaacataagagagctatgacaa

SEQ ID NO: 71158 - DNA, 40 bp, Homo sapiens
tgtcatagctctcttatgtttaagcaagaaaaaccctatt

SEQ ID NO: 71159 - DNA, 40 bp, Homo sapiens
aatagggtttttcttgcttaaacataagagagctatgaca

SEQ ID NO: 71160 - DNA, 40 bp, Homo sapiens
gtcatagctctcttatgtttaagcaagaaaaaccctatta

SEQ ID NO: 71161 - DNA, 40 bp, Homo sapiens
taatagggtttttcttgcttaaacataagagagctatgac

SEQ ID NO: 71162 - DNA, 40 bp, Homo sapiens
tcatagctctcttatgtttaagcaagaaaaaccctattaa

SEQ ID NO: 71163 - DNA, 40 bp, Homo sapiens
ttaatagggtttttcttgcttaaacataagagagctatga

SEQ ID NO: 71164 - DNA, 40 bp, Homo sapiens
catagctctcttatgtttaagcaagaaaaaccctattaag

SEQ ID NO: 71165 - DNA, 40 bp, Homo sapiens
cttaatagggtttttcttgcttaaacataagagagctatg

SEQ ID NO: 71166 - DNA, 40 bp, Homo sapiens
atagctctcttatgtttaagcaagaaaaaccctattaaga

SEQ ID NO: 71167 - DNA, 40 bp, Homo sapiens
tcttaatagggtttttcttgcttaaacataagagagctat

SEQ ID NO: 71168 - DNA, 40 bp, Homo sapiens
tagctctcttatgtttaagcaagaaaaaccctattaagag

SEQ ID NO: 71169 - DNA, 40 bp, Homo sapiens
ctcttaatagggtttttcttgcttaaacataagagagcta

SEQ ID NO: 71170 - DNA, 40 bp, Homo sapiens
agctctcttatgtttaagcaagaaaaaccctattaagagt

SEQ ID NO: 71171 - DNA, 40 bp, Homo sapiens
actcttaatagggtttttcttgcttaaacataagagagct

SEQ ID NO: 71172 - DNA, 40 bp, Homo sapiens
gctctcttatgtttaagcaagaaaaaccctattaagagta

SEQ ID NO: 71173 - DNA, 40 bp, Homo sapiens
tactcttaatagggtttttcttgcttaaacataagagagc

SEQ ID NO: 71174 - DNA, 40 bp, Homo sapiens
ctctcttatgtttaagcaagaaaaaccctattaagagtat

SEQ ID NO: 71175 - DNA, 40 bp, Homo sapiens
atactcttaatagggtttttcttgcttaaacataagagag

SEQ ID NO: 71176 - DNA, 40 bp, Homo sapiens
tctcttatgtttaagcaagaaaaaccctattaagagtatt

SEQ ID NO: 71177 - DNA, 40 bp, Homo sapiens
aatactcttaatagggtttttcttgcttaaacataagaga

SEQ ID NO: 71178 - DNA, 40 bp, Homo sapiens
ctcttatgtttaagcaagaaaaaccctattaagagtattt

SEQ ID NO: 71179 - DNA, 40 bp, Homo sapiens
aaatactcttaatagggtttttcttgcttaaacataagag

SEQ ID NO: 71180 - DNA, 40 bp, Homo sapiens
tcttatgtttaagcaagaaaaaccctattaagagtattta

SEQ ID NO: 71181 - DNA, 40 bp, Homo sapiens
taaatactcttaatagggtttttcttgcttaaacataaga

SEQ ID NO: 71182 - DNA, 40 bp, Homo sapiens
cttatgtttaagcaagaaaaaccctattaagagtatttaa

SEQ ID NO: 71183 - DNA, 40 bp, Homo sapiens
ttaaatactcttaatagggtttttcttgcttaaacataag

SEQ ID NO: 71184 - DNA, 40 bp, Homo sapiens
ttatgtttaagcaagaaaaaccctattaagagtatttaaa

SEQ ID NO: 71185 - DNA, 40 bp, Homo sapiens
tttaaatactcttaatagggtttttcttgcttaaacataa

SEQ ID NO: 71186 - DNA, 40 bp, Homo sapiens
tatgtttaagcaagaaaaaccctattaagagtatttaaat

SEQ ID NO: 71187 - DNA, 40 bp, Homo sapiens
atttaaatactcttaatagggtttttcttgcttaaacata

SEQ ID NO: 71188 - DNA, 40 bp, Homo sapiens
atgtttaagcaagaaaaaccctattaagagtatttaaatt

SEQ ID NO: 71189 - DNA, 40 bp, Homo sapiens
aatttaaatactcttaatagggtttttcttgcttaaacat

SEQ ID NO: 71190 - DNA, 40 bp, Homo sapiens
tgtttaagcaagaaaaaccctattaagagtatttaaatta

SEQ ID NO: 71191 - DNA, 40 bp, Homo sapiens
taatttaaatactcttaatagggtttttcttgcttaaaca

SEQ ID NO: 71192 - DNA, 40 bp, Homo sapiens
gtttaagcaagaaaaaccctattaagagtatttaaattag

SEQ ID NO: 71193 - DNA, 40 bp, Homo sapiens
ctaatttaaatactcttaatagggtttttcttgcttaaac

SEQ ID NO: 71194 - DNA, 40 bp, Homo sapiens
tttaagcaagaaaaaccctattaagagtatttaaattaga

SEQ ID NO: 71195 - DNA, 40 bp, Homo sapiens
tctaatttaaatactcttaatagggtttttcttgcttaaa

SEQ ID NO: 71196 - DNA, 40 bp, Homo sapiens
ttaagcaagaaaaaccctattaagagtatttaaattagaa

SEQ ID NO: 71197 - DNA, 40 bp, Homo sapiens
ttctaatttaaatactcttaatagggtttttcttgcttaa

SEQ ID NO: 71198 - DNA, 40 bp, Homo sapiens
taagcaagaaaaaccctattaagagtatttaaattagaat

SEQ ID NO: 71199 - DNA, 40 bp, Homo sapiens
attctaatttaaatactcttaatagggtttttcttgctta

SEQ ID NO: 71200 - DNA, 40 bp, Homo sapiens
aagcaagaaaaaccctattaagagtatttaaattagaatg

SEQ ID NO: 71201 - DNA, 40 bp, Homo sapiens
cattctaatttaaatactcttaatagggtttttcttgctt

SEQ ID NO: 71202 - DNA, 40 bp, Homo sapiens
agcaagaaaaaccctattaagagtatttaaattagaatgg

SEQ ID NO: 71203 - DNA, 40 bp, Homo sapiens
ccattctaatttaaatactcttaatagggtttttcttgct

SEQ ID NO: 71204 - DNA, 40 bp, Homo sapiens
gcaagaaaaaccctattaagagtatttaaattagaatgga

SEQ ID NO: 71205 - DNA, 40 bp, Homo sapiens
tccattctaatttaaatactcttaatagggtttttcttgc

SEQ ID NO: 71206 - DNA, 40 bp, Homo sapiens
caagaaaaaccctattaagagtatttaaattagaatggaa

SEQ ID NO: 71207 - DNA, 40 bp, Homo sapiens
ttccattctaatttaaatactcttaatagggtttttcttg

SEQ ID NO: 71208 - DNA, 40 bp, Homo sapiens
aagaaaaaccctattaagagtatttaaattagaatggaag

SEQ ID NO: 71209 - DNA, 40 bp, Homo sapiens
cttccattctaatttaaatactcttaatagggtttttctt

SEQ ID NO: 71210 - DNA, 40 bp, Homo sapiens
agaaaaaccctattaagagtatttaaattagaatggaagg

SEQ ID NO: 71211 - DNA, 40 bp, Homo sapiens
ccttccattctaatttaaatactcttaatagggtttttct

SEQ ID NO: 71212 - DNA, 40 bp, Homo sapiens
gaaaaaccctattaagagtatttaaattagaatggaaggc

SEQ ID NO: 71213 - DNA, 40 bp, Homo sapiens
gccttccattctaatttaaatactcttaatagggtttttc

SEQ ID NO: 71214 - DNA, 40 bp, Homo sapiens
aaaaaccctattaagagtatttaaattagaatggaaggca

SEQ ID NO: 71215 - DNA, 40 bp, Homo sapiens
tgccttccattctaatttaaatactcttaatagggttttt

SEQ ID NO: 71216 - DNA, 40 bp, Homo sapiens
aaaaccctattaagagtatttaaattagaatggaaggcac

SEQ ID NO: 71217 - DNA, 40 bp, Homo sapiens
gtgccttccattctaatttaaatactcttaatagggtttt

SEQ ID NO: 71218 - DNA, 40 bp, Homo sapiens
aaaccctattaagagtatttaaattagaatggaaggcaca

SEQ ID NO: 71219 - DNA, 40 bp, Homo sapiens
tgtgccttccattctaatttaaatactcttaatagggttt

SEQ ID NO: 71220 - DNA, 40 bp, Homo sapiens
aaccctattaagagtatttaaattagaatggaaggcacac

SEQ ID NO: 71221 - DNA, 40 bp, Homo sapiens
gtgtgccttccattctaatttaaatactcttaatagggtt

SEQ ID NO: 71222 - DNA, 40 bp, Homo sapiens
accctattaagagtatttaaattagaatggaaggcacaca

SEQ ID NO: 71223 - DNA, 40 bp, Homo sapiens
tgtgtgccttccattctaatttaaatactcttaatagggt

SEQ ID NO: 71224 - DNA, 40 bp, Homo sapiens
ccctattaagagtatttaaattagaatggaaggcacacag

SEQ ID NO: 71225 - DNA, 40 bp, Homo sapiens
ctgtgtgccttccattctaatttaaatactcttaataggg

SEQ ID NO: 71226 - DNA, 40 bp, Homo sapiens
cctattaagagtatttaaattagaatggaaggcacacagc

SEQ ID NO: 71227 - DNA, 40 bp, Homo sapiens
gctgtgtgccttccattctaatttaaatactcttaatagg

SEQ ID NO: 71228 - DNA, 40 bp, Homo sapiens
ctattaagagtatttaaattagaatggaaggcacacagcc

SEQ ID NO: 71229 - DNA, 40 bp, Homo sapiens
ggctgtgtgccttccattctaatttaaatactcttaatag

SEQ ID NO: 71230 - DNA, 40 bp, Homo sapiens
tattaagagtatttaaattagaatggaaggcacacagcca

SEQ ID NO: 71231 - DNA, 40 bp, Homo sapiens
tggctgtgtgccttccattctaatttaaatactcttaata

SEQ ID NO: 71232 - DNA, 40 bp, Homo sapiens
attaagagtatttaaattagaatggaaggcacacagccag

SEQ ID NO: 71233 - DNA, 40 bp, Homo sapiens
ctggctgtgtgccttccattctaatttaaatactcttaat

SEQ ID NO: 71234 - DNA, 40 bp, Homo sapiens
ttaagagtatttaaattagaatggaaggcacacagccagt

SEQ ID NO: 71235 - DNA, 40 bp, Homo sapiens
actggctgtgtgccttccattctaatttaaatactcttaa

SEQ ID NO: 71236 - DNA, 40 bp, Homo sapiens
taagagtatttaaattagaatggaaggcacacagccagta

SEQ ID NO: 71237 - DNA, 40 bp, Homo sapiens
tactggctgtgtgccttccattctaatttaaatactctta

SEQ ID NO: 71238 - DNA, 40 bp, Homo sapiens
aagagtatttaaattagaatggaaggcacacagccagtat

SEQ ID NO: 71239 - DNA, 40 bp, Homo sapiens
atactggctgtgtgccttccattctaatttaaatactctt

SEQ ID NO: 71240 - DNA, 40 bp, Homo sapiens
agagtatttaaattagaatggaaggcacacagccagtatg

SEQ ID NO: 71241 - DNA, 40 bp, Homo sapiens
catactggctgtgtgccttccattctaatttaaatactct

SEQ ID NO: 71242 - DNA, 40 bp, Homo sapiens
gagtatttaaattagaatggaaggcacacagccagtatga

SEQ ID NO: 71243 - DNA, 40 bp, Homo sapiens
tcatactggctgtgtgccttccattctaatttaaatactc

SEQ ID NO: 71244 - DNA, 40 bp, Homo sapiens
agtatttaaattagaatggaaggcacacagccagtatgat

SEQ ID NO: 71245 - DNA, 40 bp, Homo sapiens
atcatactggctgtgtgccttccattctaatttaaatact

SEQ ID NO: 71246 - DNA, 40 bp, Homo sapiens
gtatttaaattagaatggaaggcacacagccagtatgatt

SEQ ID NO: 71247 - DNA, 40 bp, Homo sapiens
aatcatactggctgtgtgccttccattctaatttaaatac

SEQ ID NO: 71248 - DNA, 40 bp, Homo sapiens
tatttaaattagaatggaaggcacacagccagtatgattg

SEQ ID NO: 71249 - DNA, 40 bp, Homo sapiens
caatcatactggctgtgtgccttccattctaatttaaata

SEQ ID NO: 71250 - DNA, 40 bp, Homo sapiens
atttaaattagaatggaaggcacacagccagtatgattga

SEQ ID NO: 71251 - DNA, 40 bp, Homo sapiens
tcaatcatactggctgtgtgccttccattctaatttaaat

SEQ ID NO: 71252 - DNA, 40 bp, Homo sapiens
tttaaattagaatggaaggcacacagccagtatgattgaa

SEQ ID NO: 71253 - DNA, 40 bp, Homo sapiens
ttcaatcatactggctgtgtgccttccattctaatttaaa

SEQ ID NO: 71254 - DNA, 40 bp, Homo sapiens
ttaaattagaatggaaggcacacagccagtatgattgaac

SEQ ID NO: 71255 - DNA, 40 bp, Homo sapiens
gttcaatcatactggctgtgtgccttccattctaatttaa

SEQ ID NO: 71256 - DNA, 40 bp, Homo sapiens
taaattagaatggaaggcacacagccagtatgattgaaca

SEQ ID NO: 71257 - DNA, 40 bp, Homo sapiens
tgttcaatcatactggctgtgtgccttccattctaattta

SEQ ID NO: 71258 - DNA, 40 bp, Homo sapiens
aaattagaatggaaggcacacagccagtatgattgaacac

SEQ ID NO: 71259 - DNA, 40 bp, Homo sapiens
gtgttcaatcatactggctgtgtgccttccattctaattt

SEQ ID NO: 71260 - DNA, 40 bp, Homo sapiens
aattagaatggaaggcacacagccagtatgattgaacact

SEQ ID NO: 71261 - DNA, 40 bp, Homo sapiens
agtgttcaatcatactggctgtgtgccttccattctaatt

SEQ ID NO: 71262 - DNA, 40 bp, Homo sapiens
attagaatggaaggcacacagccagtatgattgaacactg

SEQ ID NO: 71263 - DNA, 40 bp, Homo sapiens
cagtgttcaatcatactggctgtgtgccttccattctaat

SEQ ID NO: 71264 - DNA, 40 bp, Homo sapiens
ttagaatggaaggcacacagccagtatgattgaacactgt

SEQ ID NO: 71265 - DNA, 40 bp, Homo sapiens
acagtgttcaatcatactggctgtgtgccttccattctaa

SEQ ID NO: 71266 - DNA, 40 bp, Homo sapiens
tagaatggaaggcacacagccagtatgattgaacactgtt

SEQ ID NO: 71267 - DNA, 40 bp, Homo sapiens
aacagtgttcaatcatactggctgtgtgccttccattcta

SEQ ID NO: 71268 - DNA, 40 bp, Homo sapiens
agaatggaaggcacacagccagtatgattgaacactgttc

SEQ ID NO: 71269 - DNA, 40 bp, Homo sapiens
gaacagtgttcaatcatactggctgtgtgccttccattct

SEQ ID NO: 71270 - DNA, 40 bp, Homo sapiens
gaatggaaggcacacagccagtatgattgaacactgttct

SEQ ID NO: 71271 - DNA, 40 bp, Homo sapiens
agaacagtgttcaatcatactggctgtgtgccttccattc

SEQ ID NO: 71272 - DNA, 40 bp, Homo sapiens
aatggaaggcacacagccagtatgattgaacactgttcta

SEQ ID NO: 71273 - DNA, 40 bp, Homo sapiens
tagaacagtgttcaatcatactggctgtgtgccttccatt

SEQ ID NO: 71274 - DNA, 40 bp, Homo sapiens
atggaaggcacacagccagtatgattgaacactgttctaa

SEQ ID NO: 71275 - DNA, 40 bp, Homo sapiens
ttagaacagtgttcaatcatactggctgtgtgccttccat

SEQ ID NO: 71276 - DNA, 40 bp, Homo sapiens
tggaaggcacacagccagtatgattgaacactgttctaaa

SEQ ID NO: 71277 - DNA, 40 bp, Homo sapiens
tttagaacagtgttcaatcatactggctgtgtgccttcca

SEQ ID NO: 71278 - DNA, 40 bp, Homo sapiens
ggaaggcacacagccagtatgattgaacactgttctaaaa

SEQ ID NO: 71279 - DNA, 40 bp, Homo sapiens
ttttagaacagtgttcaatcatactggctgtgtgccttcc

SEQ ID NO: 71280 - DNA, 40 bp, Homo sapiens
gaaggcacacagccagtatgattgaacactgttctaaaaa

SEQ ID NO: 71281 - DNA, 40 bp, Homo sapiens
tttttagaacagtgttcaatcatactggctgtgtgccttc

SEQ ID NO: 71282 - DNA, 40 bp, Homo sapiens
aaggcacacagccagtatgattgaacactgttctaaaaat

SEQ ID NO: 71283 - DNA, 40 bp, Homo sapiens
atttttagaacagtgttcaatcatactggctgtgtgcctt

SEQ ID NO: 71284 - DNA, 40 bp, Homo sapiens
aggcacacagccagtatgattgaacactgttctaaaaatt

SEQ ID NO: 71285 - DNA, 40 bp, Homo sapiens
aatttttagaacagtgttcaatcatactggctgtgtgcct

SEQ ID NO: 71286 - DNA, 40 bp, Homo sapiens
ggcacacagccagtatgattgaacactgttctaaaaatta

SEQ ID NO: 71287 - DNA, 40 bp, Homo sapiens
taatttttagaacagtgttcaatcatactggctgtgtgcc

SEQ ID NO: 71288 - DNA, 40 bp, Homo sapiens
gcacacagccagtatgattgaacactgttctaaaaattat

SEQ ID NO: 71289 - DNA, 40 bp, Homo sapiens
ataatttttagaacagtgttcaatcatactggctgtgtgc

SEQ ID NO: 71290 - DNA, 40 bp, Homo sapiens
cacacagccagtatgattgaacactgttctaaaaattatt

SEQ ID NO: 71291 - DNA, 40 bp, Homo sapiens
aataatttttagaacagtgttcaatcatactggctgtgtg

SEQ ID NO: 71292 - DNA, 40 bp, Homo sapiens
acacagccagtatgattgaacactgttctaaaaattattt

SEQ ID NO: 71293 - DNA, 40 bp, Homo sapiens
aaataatttttagaacagtgttcaatcatactggctgtgt

SEQ ID NO: 71294 - DNA, 40 bp, Homo sapiens
cacagccagtatgattgaacactgttctaaaaattatttt

SEQ ID NO: 71295 - DNA, 40 bp, Homo sapiens
aaaataatttttagaacagtgttcaatcatactggctgtg

SEQ ID NO: 71296 - DNA, 40 bp, Homo sapiens
acagccagtatgattgaacactgttctaaaaattattttt

SEQ ID NO: 71297 - DNA, 40 bp, Homo sapiens
aaaaataatttttagaacagtgttcaatcatactggctgt

SEQ ID NO: 71298 - DNA, 40 bp, Homo sapiens
cagccagtatgattgaacactgttctaaaaattattttta

SEQ ID NO: 71299 - DNA, 40 bp, Homo sapiens
taaaaataatttttagaacagtgttcaatcatactggctg

SEQ ID NO: 71300 - DNA, 40 bp, Homo sapiens
agccagtatgattgaacactgttctaaaaattatttttaa

SEQ ID NO: 71301 - DNA, 40 bp, Homo sapiens
ttaaaaataatttttagaacagtgttcaatcatactggct

SEQ ID NO: 71302 - DNA, 40 bp, Homo sapiens
gccagtatgattgaacactgttctaaaaattatttttaag

SEQ ID NO: 71303 - DNA, 40 bp, Homo sapiens
cttaaaaataatttttagaacagtgttcaatcatactggc

SEQ ID NO: 71304 - DNA, 40 bp, Homo sapiens
ccagtatgattgaacactgttctaaaaattatttttaaga

SEQ ID NO: 71305 - DNA, 40 bp, Homo sapiens
tcttaaaaataatttttagaacagtgttcaatcatactgg

SEQ ID NO: 71306 - DNA, 40 bp, Homo sapiens
cagtatgattgaacactgttctaaaaattatttttaagac

SEQ ID NO: 71307 - DNA, 40 bp, Homo sapiens
gtcttaaaaataatttttagaacagtgttcaatcatactg

SEQ ID NO: 71308 - DNA, 40 bp, Homo sapiens
agtatgattgaacactgttctaaaaattatttttaagact

SEQ ID NO: 71309 - DNA, 40 bp, Homo sapiens
agtcttaaaaataatttttagaacagtgttcaatcatact

SEQ ID NO: 71310 - DNA, 40 bp, Homo sapiens
gtatgattgaacactgttctaaaaattatttttaagactt

SEQ ID NO: 71311 - DNA, 40 bp, Homo sapiens
aagtcttaaaaataatttttagaacagtgttcaatcatac

SEQ ID NO: 71312 - DNA, 40 bp, Homo sapiens
tatgattgaacactgttctaaaaattatttttaagacttg

SEQ ID NO: 71313 - DNA, 40 bp, Homo sapiens
caagtcttaaaaataatttttagaacagtgttcaatcata

SEQ ID NO: 71314 - DNA, 40 bp, Homo sapiens
atgattgaacactgttctaaaaattatttttaagacttgt

SEQ ID NO: 71315 - DNA, 40 bp, Homo sapiens
acaagtcttaaaaataatttttagaacagtgttcaatcat

SEQ ID NO: 71316 - DNA, 40 bp, Homo sapiens
tgattgaacactgttctaaaaattatttttaagacttgta

SEQ ID NO: 71317 - DNA, 40 bp, Homo sapiens
tacaagtcttaaaaataatttttagaacagtgttcaatca

SEQ ID NO: 71318 - DNA, 40 bp, Homo sapiens
gattgaacactgttctaaaaattatttttaagacttgtag

SEQ ID NO: 71319 - DNA, 40 bp, Homo sapiens
ctacaagtcttaaaaataatttttagaacagtgttcaatc

SEQ ID NO: 71320 - DNA, 40 bp, Homo sapiens
attgaacactgttctaaaaattatttttaagacttgtagt

SEQ ID NO: 71321 - DNA, 40 bp, Homo sapiens
actacaagtcttaaaaataatttttagaacagtgttcaat

SEQ ID NO: 71322 - DNA, 40 bp, Homo sapiens
ttgaacactgttctaaaaattatttttaagacttgtagta

SEQ ID NO: 71323 - DNA, 40 bp, Homo sapiens
tactacaagtcttaaaaataatttttagaacagtgttcaa

SEQ ID NO: 71324 - DNA, 40 bp, Homo sapiens
tgaacactgttctaaaaattatttttaagacttgtagtaa

SEQ ID NO: 71325 - DNA, 40 bp, Homo sapiens
ttactacaagtcttaaaaataatttttagaacagtgttca

SEQ ID NO: 71326 - DNA, 40 bp, Homo sapiens
gaacactgttctaaaaattatttttaagacttgtagtaag

SEQ ID NO: 71327 - DNA, 40 bp, Homo sapiens
cttactacaagtcttaaaaataatttttagaacagtgttc

SEQ ID NO: 71328 - DNA, 40 bp, Homo sapiens
aacactgttctaaaaattatttttaagacttgtagtaagg

SEQ ID NO: 71329 - DNA, 40 bp, Homo sapiens
ccttactacaagtcttaaaaataatttttagaacagtgtt

SEQ ID NO: 71330 - DNA, 40 bp, Homo sapiens
acactgttctaaaaattatttttaagacttgtagtaaggc

SEQ ID NO: 71331 - DNA, 40 bp, Homo sapiens
gccttactacaagtcttaaaaataatttttagaacagtgt

SEQ ID NO: 71332 - DNA, 40 bp, Homo sapiens
cactgttctaaaaattatttttaagacttgtagtaaggcc

SEQ ID NO: 71333 - DNA, 40 bp, Homo sapiens
ggccttactacaagtcttaaaaataatttttagaacagtg

SEQ ID NO: 71334 - DNA, 40 bp, Homo sapiens
actgttctaaaaattatttttaagacttgtagtaaggcca

SEQ ID NO: 71335 - DNA, 40 bp, Homo sapiens
tggccttactacaagtcttaaaaataatttttagaacagt

SEQ ID NO: 71336 - DNA, 40 bp, Homo sapiens
ctgttctaaaaattatttttaagacttgtagtaaggccag

SEQ ID NO: 71337 - DNA, 40 bp, Homo sapiens
ctggccttactacaagtcttaaaaataatttttagaacag

SEQ ID NO: 71338 - DNA, 40 bp, Homo sapiens
tgttctaaaaattatttttaagacttgtagtaaggccagg

SEQ ID NO: 71339 - DNA, 40 bp, Homo sapiens
cctggccttactacaagtcttaaaaataatttttagaaca

SEQ ID NO: 71340 - DNA, 40 bp, Homo sapiens
gttctaaaaattatttttaagacttgtagtaaggccaggt

SEQ ID NO: 71341 - DNA, 40 bp, Homo sapiens
acctggccttactacaagtcttaaaaataatttttagaac

SEQ ID NO: 71342 - DNA, 40 bp, Homo sapiens
ttctaaaaattatttttaagacttgtagtaaggccaggtt

SEQ ID NO: 71343 - DNA, 40 bp, Homo sapiens
aacctggccttactacaagtcttaaaaataatttttagaa

SEQ ID NO: 71344 - DNA, 40 bp, Homo sapiens
tctaaaaattatttttaagacttgtagtaaggccaggttt

SEQ ID NO: 71345 - DNA, 40 bp, Homo sapiens
aaacctggccttactacaagtcttaaaaataatttttaga

SEQ ID NO: 71346 - DNA, 40 bp, Homo sapiens
ctaaaaattatttttaagacttgtagtaaggccaggtttg

SEQ ID NO: 71347 - DNA, 40 bp, Homo sapiens
caaacctggccttactacaagtcttaaaaataatttttag

SEQ ID NO: 71348 - DNA, 40 bp, Homo sapiens
taaaaattatttttaagacttgtagtaaggccaggtttgg

SEQ ID NO: 71349 - DNA, 40 bp, Homo sapiens
ccaaacctggccttactacaagtcttaaaaataattttta

SEQ ID NO: 71350 - DNA, 40 bp, Homo sapiens
aaaaattatttttaagacttgtagtaaggccaggtttggt

SEQ ID NO: 71351 - DNA, 40 bp, Homo sapiens
accaaacctggccttactacaagtcttaaaaataattttt

SEQ ID NO: 71352 - DNA, 40 bp, Homo sapiens
aaaattatttttaagacttgtagtaaggccaggtttggtg

SEQ ID NO: 71353 - DNA, 40 bp, Homo sapiens
caccaaacctggccttactacaagtcttaaaaataatttt

SEQ ID NO: 71354 - DNA, 40 bp, Homo sapiens
aaattatttttaagacttgtagtaaggccaggtttggtgg

SEQ ID NO: 71355 - DNA, 40 bp, Homo sapiens
ccaccaaacctggccttactacaagtcttaaaaataattt

SEQ ID NO: 71356 - DNA, 40 bp, Homo sapiens
aattatttttaagacttgtagtaaggccaggtttggtggc

SEQ ID NO: 71357 - DNA, 40 bp, Homo sapiens
gccaccaaacctggccttactacaagtcttaaaaataatt

SEQ ID NO: 71358 - DNA, 40 bp, Homo sapiens
attatttttaagacttgtagtaaggccaggtttggtggct

SEQ ID NO: 71359 - DNA, 40 bp, Homo sapiens
agccaccaaacctggccttactacaagtcttaaaaataat

SEQ ID NO: 71360 - DNA, 40 bp, Homo sapiens
ttatttttaagacttgtagtaaggccaggtttggtggctc

SEQ ID NO: 71361 - DNA, 40 bp, Homo sapiens
gagccaccaaacctggccttactacaagtcttaaaaataa

SEQ ID NO: 71362 - DNA, 40 bp, Homo sapiens
tatttttaagacttgtagtaaggccaggtttggtggctca

SEQ ID NO: 71363 - DNA, 40 bp, Homo sapiens
tgagccaccaaacctggccttactacaagtcttaaaaata

SEQ ID NO: 71364 - DNA, 40 bp, Homo sapiens
atttttaagacttgtagtaaggccaggtttggtggctcat

SEQ ID NO: 71365 - DNA, 40 bp, Homo sapiens
atgagccaccaaacctggccttactacaagtcttaaaaat

SEQ ID NO: 71366 - DNA, 40 bp, Homo sapiens
tttttaagacttgtagtaaggccaggtttggtggctcatg

SEQ ID NO: 71367 - DNA, 40 bp, Homo sapiens
catgagccaccaaacctggccttactacaagtcttaaaaa

SEQ ID NO: 71368 - DNA, 40 bp, Homo sapiens
ttttaagacttgtagtaaggccaggtttggtggctcatgg

SEQ ID NO: 71369 - DNA, 40 bp, Homo sapiens
ccatgagccaccaaacctggccttactacaagtcttaaaa

SEQ ID NO: 71370 - DNA, 40 bp, Homo sapiens
tttaagacttgtagtaaggccaggtttggtggctcatggc

SEQ ID NO: 71371 - DNA, 40 bp, Homo sapiens
gccatgagccaccaaacctggccttactacaagtcttaaa

SEQ ID NO: 71372 - DNA, 40 bp, Homo sapiens
ttaagacttgtagtaaggccaggtttggtggctcatggct

SEQ ID NO: 71373 - DNA, 40 bp, Homo sapiens
agccatgagccaccaaacctggccttactacaagtcttaa

SEQ ID NO: 71374 - DNA, 40 bp, Homo sapiens
taagacttgtagtaaggccaggtttggtggctcatggctg

SEQ ID NO: 71375 - DNA, 40 bp, Homo sapiens
cagccatgagccaccaaacctggccttactacaagtctta

SEQ ID NO: 71376 - DNA, 40 bp, Homo sapiens
aagacttgtagtaaggccaggtttggtggctcatggctgt

SEQ ID NO: 71377 - DNA, 40 bp, Homo sapiens
acagccatgagccaccaaacctggccttactacaagtctt

SEQ ID NO: 71378 - DNA, 40 bp, Homo sapiens
agacttgtagtaaggccaggtttggtggctcatggctgta

SEQ ID NO: 71379 - DNA, 40 bp, Homo sapiens
tacagccatgagccaccaaacctggccttactacaagtct

SEQ ID NO: 71380 - DNA, 40 bp, Homo sapiens
gacttgtagtaaggccaggtttggtggctcatggctgtaa

SEQ ID NO: 71381 - DNA, 40 bp, Homo sapiens
ttacagccatgagccaccaaacctggccttactacaagtc

SEQ ID NO: 71382 - DNA, 40 bp, Homo sapiens
acttgtagtaaggccaggtttggtggctcatggctgtaat

SEQ ID NO: 71383 - DNA, 40 bp, Homo sapiens
attacagccatgagccaccaaacctggccttactacaagt

SEQ ID NO: 71384 - DNA, 40 bp, Homo sapiens
cttgtagtaaggccaggtttggtggctcatggctgtaatc

SEQ ID NO: 71385 - DNA, 40 bp, Homo sapiens
gattacagccatgagccaccaaacctggccttactacaag

SEQ ID NO: 71386 - DNA, 40 bp, Homo sapiens
ttgtagtaaggccaggtttggtggctcatggctgtaatcc

SEQ ID NO: 71387 - DNA, 40 bp, Homo sapiens
ggattacagccatgagccaccaaacctggccttactacaa

SEQ ID NO: 71388 - DNA, 40 bp, Homo sapiens
tgtagtaaggccaggtttggtggctcatggctgtaatccc

SEQ ID NO: 71389 - DNA, 40 bp, Homo sapiens
gggattacagccatgagccaccaaacctggccttactaca

SEQ ID NO: 71390 - DNA, 40 bp, Homo sapiens
gtagtaaggccaggtttggtggctcatggctgtaatccca

SEQ ID NO: 71391 - DNA, 40 bp, Homo sapiens
tgggattacagccatgagccaccaaacctggccttactac

SEQ ID NO: 71392 - DNA, 40 bp, Homo sapiens
tagtaaggccaggtttggtggctcatggctgtaatcccag

SEQ ID NO: 71393 - DNA, 40 bp, Homo sapiens
ctgggattacagccatgagccaccaaacctggccttacta

SEQ ID NO: 71394 - DNA, 40 bp, Homo sapiens
agtaaggccaggtttggtggctcatggctgtaatcccagc

SEQ ID NO: 71395 - DNA, 40 bp, Homo sapiens
gctgggattacagccatgagccaccaaacctggccttact

SEQ ID NO: 71396 - DNA, 40 bp, Homo sapiens
gtaaggccaggtttggtggctcatggctgtaatcccagcc

SEQ ID NO: 71397 - DNA, 40 bp, Homo sapiens
ggctgggattacagccatgagccaccaaacctggccttac

SEQ ID NO: 71398 - DNA, 40 bp, Homo sapiens
taaggccaggtttggtggctcatggctgtaatcccagccc

SEQ ID NO: 71399 - DNA, 40 bp, Homo sapiens
gggctgggattacagccatgagccaccaaacctggcctta

SEQ ID NO: 71400 - DNA, 40 bp, Homo sapiens
aaggccaggtttggtggctcatggctgtaatcccagccct

SEQ ID NO: 71401 - DNA, 40 bp, Homo sapiens
agggctgggattacagccatgagccaccaaacctggcctt

SEQ ID NO: 71402 - DNA, 40 bp, Homo sapiens
aggccaggtttggtggctcatggctgtaatcccagccctt

SEQ ID NO: 71403 - DNA, 40 bp, Homo sapiens
aagggctgggattacagccatgagccaccaaacctggcct

SEQ ID NO: 71404 - DNA, 40 bp, Homo sapiens
ggccaggtttggtggctcatggctgtaatcccagccctta

SEQ ID NO: 71405 - DNA, 40 bp, Homo sapiens
taagggctgggattacagccatgagccaccaaacctggcc

SEQ ID NO: 71406 - DNA, 40 bp, Homo sapiens
gccaggtttggtggctcatggctgtaatcccagcccttag

SEQ ID NO: 71407 - DNA, 40 bp, Homo sapiens
ctaagggctgggattacagccatgagccaccaaacctggc

SEQ ID NO: 71408 - DNA, 40 bp, Homo sapiens
ccaggtttggtggctcatggctgtaatcccagcccttagg

SEQ ID NO: 71409 - DNA, 40 bp, Homo sapiens
cctaagggctgggattacagccatgagccaccaaacctgg

SEQ ID NO: 71410 - DNA, 40 bp, Homo sapiens
caggtttggtggctcatggctgtaatcccagcccttagga

SEQ ID NO: 71411 - DNA, 40 bp, Homo sapiens
tcctaagggctgggattacagccatgagccaccaaacctg

SEQ ID NO: 71412 - DNA, 40 bp, Homo sapiens
aggtttggtggctcatggctgtaatcccagcccttaggag

SEQ ID NO: 71413 - DNA, 40 bp, Homo sapiens
ctcctaagggctgggattacagccatgagccaccaaacct

SEQ ID NO: 71414 - DNA, 40 bp, Homo sapiens
ggtttggtggctcatggctgtaatcccagcccttaggagg

SEQ ID NO: 71415 - DNA, 40 bp, Homo sapiens
cctcctaagggctgggattacagccatgagccaccaaacc

SEQ ID NO: 71416 - DNA, 40 bp, Homo sapiens
gtttggtggctcatggctgtaatcccagcccttaggaggc

SEQ ID NO: 71417 - DNA, 40 bp, Homo sapiens
gcctcctaagggctgggattacagccatgagccaccaaac

SEQ ID NO: 71418 - DNA, 40 bp, Homo sapiens
tttggtggctcatggctgtaatcccagcccttaggaggcc

SEQ ID NO: 71419 - DNA, 40 bp, Homo sapiens
ggcctcctaagggctgggattacagccatgagccaccaaa

SEQ ID NO: 71420 - DNA, 40 bp, Homo sapiens
ttggtggctcatggctgtaatcccagcccttaggaggcca

SEQ ID NO: 71421 - DNA, 40 bp, Homo sapiens
tggcctcctaagggctgggattacagccatgagccaccaa

SEQ ID NO: 71422 - DNA, 40 bp, Homo sapiens
tggtggctcatggctgtaatcccagcccttaggaggccaa

SEQ ID NO: 71423 - DNA, 40 bp, Homo sapiens
ttggcctcctaagggctgggattacagccatgagccacca

SEQ ID NO: 71424 - DNA, 40 bp, Homo sapiens
ggtggctcatggctgtaatcccagcccttaggaggccaag

SEQ ID NO: 71425 - DNA, 40 bp, Homo sapiens
cttggcctcctaagggctgggattacagccatgagccacc

SEQ ID NO: 71426 - DNA, 40 bp, Homo sapiens
gtggctcatggctgtaatcccagcccttaggaggccaagg

SEQ ID NO: 71427 - DNA, 40 bp, Homo sapiens
ccttggcctcctaagggctgggattacagccatgagccac

SEQ ID NO: 71428 - DNA, 40 bp, Homo sapiens
tggctcatggctgtaatcccagcccttaggaggccaaggt

SEQ ID NO: 71429 - DNA, 40 bp, Homo sapiens
accttggcctcctaagggctgggattacagccatgagcca

SEQ ID NO: 71430 - DNA, 40 bp, Homo sapiens
ggctcatggctgtaatcccagcccttaggaggccaaggtg

SEQ ID NO: 71431 - DNA, 40 bp, Homo sapiens
caccttggcctcctaagggctgggattacagccatgagcc

SEQ ID NO: 71432 - DNA, 40 bp, Homo sapiens
gctcatggctgtaatcccagcccttaggaggccaaggtgg

SEQ ID NO: 71433 - DNA, 40 bp, Homo sapiens
ccaccttggcctcctaagggctgggattacagccatgagc

SEQ ID NO: 71434 - DNA, 40 bp, Homo sapiens
ctcatggctgtaatcccagcccttaggaggccaaggtggg

SEQ ID NO: 71435 - DNA, 40 bp, Homo sapiens
cccaccttggcctcctaagggctgggattacagccatgag

SEQ ID NO: 71436 - DNA, 40 bp, Homo sapiens
tcatggctgtaatcccagcccttaggaggccaaggtgggc

SEQ ID NO: 71437 - DNA, 40 bp, Homo sapiens
gcccaccttggcctcctaagggctgggattacagccatga

SEQ ID NO: 71438 - DNA, 40 bp, Homo sapiens
catggctgtaatcccagcccttaggaggccaaggtgggcg

SEQ ID NO: 71439 - DNA, 40 bp, Homo sapiens
cgcccaccttggcctcctaagggctgggattacagccatg

SEQ ID NO: 71440 - DNA, 40 bp, Homo sapiens
atggctgtaatcccagcccttaggaggccaaggtgggcgg

SEQ ID NO: 71441 - DNA, 40 bp, Homo sapiens
ccgcccaccttggcctcctaagggctgggattacagccat

SEQ ID NO: 71442 - DNA, 40 bp, Homo sapiens
tggctgtaatcccagcccttaggaggccaaggtgggcgga

SEQ ID NO: 71443 - DNA, 40 bp, Homo sapiens
tccgcccaccttggcctcctaagggctgggattacagcca

SEQ ID NO: 71444 - DNA, 40 bp, Homo sapiens
ggctgtaatcccagcccttaggaggccaaggtgggcggat

SEQ ID NO: 71445 - DNA, 40 bp, Homo sapiens
atccgcccaccttggcctcctaagggctgggattacagcc

SEQ ID NO: 71446 - DNA, 40 bp, Homo sapiens
gctgtaatcccagcccttaggaggccaaggtgggcggatc

SEQ ID NO: 71447 - DNA, 40 bp, Homo sapiens
gatccgcccaccttggcctcctaagggctgggattacagc

SEQ ID NO: 71448 - DNA, 40 bp, Homo sapiens
ctgtaatcccagcccttaggaggccaaggtgggcggatca

SEQ ID NO: 71449 - DNA, 40 bp, Homo sapiens
tgatccgcccaccttggcctcctaagggctgggattacag

SEQ ID NO: 71450 - DNA, 40 bp, Homo sapiens
tgtaatcccagcccttaggaggccaaggtgggcggatcac

SEQ ID NO: 71451 - DNA, 40 bp, Homo sapiens
gtgatccgcccaccttggcctcctaagggctgggattaca

SEQ ID NO: 71452 - DNA, 40 bp, Homo sapiens
gtaatcccagcccttaggaggccaaggtgggcggatcact

SEQ ID NO: 71453 - DNA, 40 bp, Homo sapiens
agtgatccgcccaccttggcctcctaagggctgggattac

SEQ ID NO: 71454 - DNA, 40 bp, Homo sapiens
taatcccagcccttaggaggccaaggtgggcggatcactt

SEQ ID NO: 71455 - DNA, 40 bp, Homo sapiens
aagtgatccgcccaccttggcctcctaagggctgggatta

SEQ ID NO: 71456 - DNA, 40 bp, Homo sapiens
aatcccagcccttaggaggccaaggtgggcggatcacttg

SEQ ID NO: 71457 - DNA, 40 bp, Homo sapiens
caagtgatccgcccaccttggcctcctaagggctgggatt

SEQ ID NO: 71458 - DNA, 40 bp, Homo sapiens
atcccagcccttaggaggccaaggtgggcggatcacttgt

SEQ ID NO: 71459 - DNA, 40 bp, Homo sapiens
acaagtgatccgcccaccttggcctcctaagggctgggat

SEQ ID NO: 71460 - DNA, 40 bp, Homo sapiens
tcccagcccttaggaggccaaggtgggcggatcacttgtg

SEQ ID NO: 71461 - DNA, 40 bp, Homo sapiens
cacaagtgatccgcccaccttggcctcctaagggctggga

SEQ ID NO: 71462 - DNA, 40 bp, Homo sapiens
cccagcccttaggaggccaaggtgggcggatcacttgtgc

SEQ ID NO: 71463 - DNA, 40 bp, Homo sapiens
gcacaagtgatccgcccaccttggcctcctaagggctggg

SEQ ID NO: 71464 - DNA, 40 bp, Homo sapiens
ccagcccttaggaggccaaggtgggcggatcacttgtgct

SEQ ID NO: 71465 - DNA, 40 bp, Homo sapiens
agcacaagtgatccgcccaccttggcctcctaagggctgg

SEQ ID NO: 71466 - DNA, 40 bp, Homo sapiens
cagcccttaggaggccaaggtgggcggatcacttgtgctc

SEQ ID NO: 71467 - DNA, 40 bp, Homo sapiens
gagcacaagtgatccgcccaccttggcctcctaagggctg

SEQ ID NO: 71468 - DNA, 40 bp, Homo sapiens
agcccttaggaggccaaggtgggcggatcacttgtgctca

SEQ ID NO: 71469 - DNA, 40 bp, Homo sapiens
tgagcacaagtgatccgcccaccttggcctcctaagggct

SEQ ID NO: 71470 - DNA, 40 bp, Homo sapiens
gcccttaggaggccaaggtgggcggatcacttgtgctcag

SEQ ID NO: 71471 - DNA, 40 bp, Homo sapiens
ctgagcacaagtgatccgcccaccttggcctcctaagggc

SEQ ID NO: 71472 - DNA, 40 bp, Homo sapiens
cccttaggaggccaaggtgggcggatcacttgtgctcagg

SEQ ID NO: 71473 - DNA, 40 bp, Homo sapiens
cctgagcacaagtgatccgcccaccttggcctcctaaggg

SEQ ID NO: 71474 - DNA, 40 bp, Homo sapiens
ccttaggaggccaaggtgggcggatcacttgtgctcagga

SEQ ID NO: 71475 - DNA, 40 bp, Homo sapiens
tcctgagcacaagtgatccgcccaccttggcctcctaagg

SEQ ID NO: 71476 - DNA, 40 bp, Homo sapiens
cttaggaggccaaggtgggcggatcacttgtgctcaggag

SEQ ID NO: 71477 - DNA, 40 bp, Homo sapiens
ctcctgagcacaagtgatccgcccaccttggcctcctaag

SEQ ID NO: 71478 - DNA, 40 bp, Homo sapiens
ttaggaggccaaggtgggcggatcacttgtgctcaggagt

SEQ ID NO: 71479 - DNA, 40 bp, Homo sapiens
actcctgagcacaagtgatccgcccaccttggcctcctaa

SEQ ID NO: 71480 - DNA, 40 bp, Homo sapiens
taggaggccaaggtgggcggatcacttgtgctcaggagtt

SEQ ID NO: 71481 - DNA, 40 bp, Homo sapiens
aactcctgagcacaagtgatccgcccaccttggcctccta

SEQ ID NO: 71482 - DNA, 40 bp, Homo sapiens
aggaggccaaggtgggcggatcacttgtgctcaggagttt

SEQ ID NO: 71483 - DNA, 40 bp, Homo sapiens
aaactcctgagcacaagtgatccgcccaccttggcctcct

SEQ ID NO: 71484 - DNA, 40 bp, Homo sapiens
ggaggccaaggtgggcggatcacttgtgctcaggagtttg

SEQ ID NO: 71485 - DNA, 40 bp, Homo sapiens
caaactcctgagcacaagtgatccgcccaccttggcctcc

SEQ ID NO: 71486 - DNA, 40 bp, Homo sapiens
gaggccaaggtgggcggatcacttgtgctcaggagtttga

SEQ ID NO: 71487 - DNA, 40 bp, Homo sapiens
tcaaactcctgagcacaagtgatccgcccaccttggcctc

SEQ ID NO: 71488 - DNA, 40 bp, Homo sapiens
aggccaaggtgggcggatcacttgtgctcaggagtttgag

SEQ ID NO: 71489 - DNA, 40 bp, Homo sapiens
ctcaaactcctgagcacaagtgatccgcccaccttggcct

SEQ ID NO: 71490 - DNA, 40 bp, Homo sapiens
ggccaaggtgggcggatcacttgtgctcaggagtttgaga

SEQ ID NO: 71491 - DNA, 40 bp, Homo sapiens
tctcaaactcctgagcacaagtgatccgcccaccttggcc

SEQ ID NO: 71492 - DNA, 40 bp, Homo sapiens
gccaaggtgggcggatcacttgtgctcaggagtttgagac

SEQ ID NO: 71493 - DNA, 40 bp, Homo sapiens
gtctcaaactcctgagcacaagtgatccgcccaccttggc

SEQ ID NO: 71494 - DNA, 40 bp, Homo sapiens
ccaaggtgggcggatcacttgtgctcaggagtttgagacc

SEQ ID NO: 71495 - DNA, 40 bp, Homo sapiens
ggtctcaaactcctgagcacaagtgatccgcccaccttgg

SEQ ID NO: 71496 - DNA, 40 bp, Homo sapiens
caaggtgggcggatcacttgtgctcaggagtttgagacca

SEQ ID NO: 71497 - DNA, 40 bp, Homo sapiens
tggtctcaaactcctgagcacaagtgatccgcccaccttg

SEQ ID NO: 71498 - DNA, 40 bp, Homo sapiens
aaggtgggcggatcacttgtgctcaggagtttgagaccag

SEQ ID NO: 71499 - DNA, 40 bp, Homo sapiens
ctggtctcaaactcctgagcacaagtgatccgcccacctt

SEQ ID NO: 71500 - DNA, 40 bp, Homo sapiens
aggtgggcggatcacttgtgctcaggagtttgagaccagc

SEQ ID NO: 71501 - DNA, 40 bp, Homo sapiens
gctggtctcaaactcctgagcacaagtgatccgcccacct

SEQ ID NO: 71502 - DNA, 40 bp, Homo sapiens
ggtgggcggatcacttgtgctcaggagtttgagaccagcc

SEQ ID NO: 71503 - DNA, 40 bp, Homo sapiens
ggctggtctcaaactcctgagcacaagtgatccgcccacc

SEQ ID NO: 71504 - DNA, 40 bp, Homo sapiens
gtgggcggatcacttgtgctcaggagtttgagaccagccc

SEQ ID NO: 71505 - DNA, 40 bp, Homo sapiens
gggctggtctcaaactcctgagcacaagtgatccgcccac

SEQ ID NO: 71506 - DNA, 40 bp, Homo sapiens
tgggcggatcacttgtgctcaggagtttgagaccagcccg

SEQ ID NO: 71507 - DNA, 40 bp, Homo sapiens
cgggctggtctcaaactcctgagcacaagtgatccgccca

SEQ ID NO: 71508 - DNA, 40 bp, Homo sapiens
gggcggatcacttgtgctcaggagtttgagaccagcccgg

SEQ ID NO: 71509 - DNA, 40 bp, Homo sapiens
ccgggctggtctcaaactcctgagcacaagtgatccgccc

SEQ ID NO: 71510 - DNA, 40 bp, Homo sapiens
ggcggatcacttgtgctcaggagtttgagaccagcccggg

SEQ ID NO: 71511 - DNA, 40 bp, Homo sapiens
cccgggctggtctcaaactcctgagcacaagtgatccgcc

SEQ ID NO: 71512 - DNA, 40 bp, Homo sapiens
gcggatcacttgtgctcaggagtttgagaccagcccgggc

SEQ ID NO: 71513 - DNA, 40 bp, Homo sapiens
gcccgggctggtctcaaactcctgagcacaagtgatccgc

SEQ ID NO: 71514 - DNA, 40 bp, Homo sapiens
cggatcacttgtgctcaggagtttgagaccagcccgggca

SEQ ID NO: 71515 - DNA, 40 bp, Homo sapiens
tgcccgggctggtctcaaactcctgagcacaagtgatccg

SEQ ID NO: 71516 - DNA, 40 bp, Homo sapiens
ggatcacttgtgctcaggagtttgagaccagcccgggcaa

SEQ ID NO: 71517 - DNA, 40 bp, Homo sapiens
ttgcccgggctggtctcaaactcctgagcacaagtgatcc

SEQ ID NO: 71518 - DNA, 40 bp, Homo sapiens
gatcacttgtgctcaggagtttgagaccagcccgggcaac

SEQ ID NO: 71519 - DNA, 40 bp, Homo sapiens
gttgcccgggctggtctcaaactcctgagcacaagtgatc

SEQ ID NO: 71520 - DNA, 40 bp, Homo sapiens
atcacttgtgctcaggagtttgagaccagcccgggcaaca

SEQ ID NO: 71521 - DNA, 40 bp, Homo sapiens
tgttgcccgggctggtctcaaactcctgagcacaagtgat

SEQ ID NO: 71522 - DNA, 40 bp, Homo sapiens
tcacttgtgctcaggagtttgagaccagcccgggcaacat

SEQ ID NO: 71523 - DNA, 40 bp, Homo sapiens
atgttgcccgggctggtctcaaactcctgagcacaagtga

SEQ ID NO: 71524 - DNA, 40 bp, Homo sapiens
cacttgtgctcaggagtttgagaccagcccgggcaacatg

SEQ ID NO: 71525 - DNA, 40 bp, Homo sapiens
catgttgcccgggctggtctcaaactcctgagcacaagtg

SEQ ID NO: 71526 - DNA, 40 bp, Homo sapiens
acttgtgctcaggagtttgagaccagcccgggcaacatgg

SEQ ID NO: 71527 - DNA, 40 bp, Homo sapiens
ccatgttgcccgggctggtctcaaactcctgagcacaagt

SEQ ID NO: 71528 - DNA, 40 bp, Homo sapiens
cttgtgctcaggagtttgagaccagcccgggcaacatggc

SEQ ID NO: 71529 - DNA, 40 bp, Homo sapiens
gccatgttgcccgggctggtctcaaactcctgagcacaag

SEQ ID NO: 71530 - DNA, 40 bp, Homo sapiens
ttgtgctcaggagtttgagaccagcccgggcaacatggca

SEQ ID NO: 71531 - DNA, 40 bp, Homo sapiens
tgccatgttgcccgggctggtctcaaactcctgagcacaa

SEQ ID NO: 71532 - DNA, 40 bp, Homo sapiens
tgtgctcaggagtttgagaccagcccgggcaacatggcaa

SEQ ID NO: 71533 - DNA, 40 bp, Homo sapiens
ttgccatgttgcccgggctggtctcaaactcctgagcaca

SEQ ID NO: 71534 - DNA, 40 bp, Homo sapiens
gtgctcaggagtttgagaccagcccgggcaacatggcaaa

SEQ ID NO: 71535 - DNA, 40 bp, Homo sapiens
tttgccatgttgcccgggctggtctcaaactcctgagcac

SEQ ID NO: 71536 - DNA, 40 bp, Homo sapiens
tgctcaggagtttgagaccagcccgggcaacatggcaaaa

SEQ ID NO: 71537 - DNA, 40 bp, Homo sapiens
ttttgccatgttgcccgggctggtctcaaactcctgagca

SEQ ID NO: 71538 - DNA, 40 bp, Homo sapiens
gctcaggagtttgagaccagcccgggcaacatggcaaaac

SEQ ID NO: 71539 - DNA, 40 bp, Homo sapiens
gttttgccatgttgcccgggctggtctcaaactcctgagc

SEQ ID NO: 71540 - DNA, 40 bp, Homo sapiens
ctcaggagtttgagaccagcccgggcaacatggcaaaacc

SEQ ID NO: 71541 - DNA, 40 bp, Homo sapiens
ggttttgccatgttgcccgggctggtctcaaactcctgag

SEQ ID NO: 71542 - DNA, 40 bp, Homo sapiens
tcaggagtttgagaccagcccgggcaacatggcaaaaccc

SEQ ID NO: 71543 - DNA, 40 bp, Homo sapiens
gggttttgccatgttgcccgggctggtctcaaactcctga

SEQ ID NO: 71544 - DNA, 40 bp, Homo sapiens
caggagtttgagaccagcccgggcaacatggcaaaaccct

SEQ ID NO: 71545 - DNA, 40 bp, Homo sapiens
agggttttgccatgttgcccgggctggtctcaaactcctg

SEQ ID NO: 71546 - DNA, 40 bp, Homo sapiens
aggagtttgagaccagcccgggcaacatggcaaaaccctg

SEQ ID NO: 71547 - DNA, 40 bp, Homo sapiens
cagggttttgccatgttgcccgggctggtctcaaactcct

SEQ ID NO: 71548 - DNA, 40 bp, Homo sapiens
ggagtttgagaccagcccgggcaacatggcaaaaccctgt

SEQ ID NO: 71549 - DNA, 40 bp, Homo sapiens
acagggttttgccatgttgcccgggctggtctcaaactcc

SEQ ID NO: 71550 - DNA, 40 bp, Homo sapiens
gagtttgagaccagcccgggcaacatggcaaaaccctgtc

SEQ ID NO: 71551 - DNA, 40 bp, Homo sapiens
gacagggttttgccatgttgcccgggctggtctcaaactc

SEQ ID NO: 71552 - DNA, 40 bp, Homo sapiens
agtttgagaccagcccgggcaacatggcaaaaccctgtct

SEQ ID NO: 71553 - DNA, 40 bp, Homo sapiens
agacagggttttgccatgttgcccgggctggtctcaaact

SEQ ID NO: 71554 - DNA, 40 bp, Homo sapiens
gtttgagaccagcccgggcaacatggcaaaaccctgtctc

SEQ ID NO: 71555 - DNA, 40 bp, Homo sapiens
gagacagggttttgccatgttgcccgggctggtctcaaac

SEQ ID NO: 71556 - DNA, 40 bp, Homo sapiens
tttgagaccagcccgggcaacatggcaaaaccctgtctct

SEQ ID NO: 71557 - DNA, 40 bp, Homo sapiens
agagacagggttttgccatgttgcccgggctggtctcaaa

SEQ ID NO: 71558 - DNA, 40 bp, Homo sapiens
ttgagaccagcccgggcaacatggcaaaaccctgtctcta

SEQ ID NO: 71559 - DNA, 40 bp, Homo sapiens
tagagacagggttttgccatgttgcccgggctggtctcaa

SEQ ID NO: 71560 - DNA, 40 bp, Homo sapiens
tgagaccagcccgggcaacatggcaaaaccctgtctctac

SEQ ID NO: 71561 - DNA, 40 bp, Homo sapiens
gtagagacagggttttgccatgttgcccgggctggtctca

SEQ ID NO: 71562 - DNA, 40 bp, Homo sapiens
gagaccagcccgggcaacatggcaaaaccctgtctctacg

SEQ ID NO: 71563 - DNA, 40 bp, Homo sapiens
cgtagagacagggttttgccatgttgcccgggctggtctc

SEQ ID NO: 71564 - DNA, 40 bp, Homo sapiens
agaccagcccgggcaacatggcaaaaccctgtctctacga

SEQ ID NO: 71565 - DNA, 40 bp, Homo sapiens
tcgtagagacagggttttgccatgttgcccgggctggtct

SEQ ID NO: 71566 - DNA, 40 bp, Homo sapiens
gaccagcccgggcaacatggcaaaaccctgtctctacgaa

SEQ ID NO: 71567 - DNA, 40 bp, Homo sapiens
ttcgtagagacagggttttgccatgttgcccgggctggtc

SEQ ID NO: 71568 - DNA, 40 bp, Homo sapiens
accagcccgggcaacatggcaaaaccctgtctctacgaaa

SEQ ID NO: 71569 - DNA, 40 bp, Homo sapiens
tttcgtagagacagggttttgccatgttgcccgggctggt

SEQ ID NO: 71570 - DNA, 40 bp, Homo sapiens
ccagcccgggcaacatggcaaaaccctgtctctacgaaaa

SEQ ID NO: 71571 - DNA, 40 bp, Homo sapiens
ttttcgtagagacagggttttgccatgttgcccgggctgg

SEQ ID NO: 71572 - DNA, 40 bp, Homo sapiens
cagcccgggcaacatggcaaaaccctgtctctacgaaaaa

SEQ ID NO: 71573 - DNA, 40 bp, Homo sapiens
tttttcgtagagacagggttttgccatgttgcccgggctg

SEQ ID NO: 71574 - DNA, 40 bp, Homo sapiens
agcccgggcaacatggcaaaaccctgtctctacgaaaaat

SEQ ID NO: 71575 - DNA, 40 bp, Homo sapiens
atttttcgtagagacagggttttgccatgttgcccgggct

SEQ ID NO: 71576 - DNA, 40 bp, Homo sapiens
gcccgggcaacatggcaaaaccctgtctctacgaaaaata

SEQ ID NO: 71577 - DNA, 40 bp, Homo sapiens
tatttttcgtagagacagggttttgccatgttgcccgggc

SEQ ID NO: 71578 - DNA, 40 bp, Homo sapiens
cccgggcaacatggcaaaaccctgtctctacgaaaaatac

SEQ ID NO: 71579 - DNA, 40 bp, Homo sapiens
gtatttttcgtagagacagggttttgccatgttgcccggg

SEQ ID NO: 71580 - DNA, 40 bp, Homo sapiens
ccgggcaacatggcaaaaccctgtctctacgaaaaataca

SEQ ID NO: 71581 - DNA, 40 bp, Homo sapiens
tgtatttttcgtagagacagggttttgccatgttgcccgg

SEQ ID NO: 71582 - DNA, 40 bp, Homo sapiens
cgggcaacatggcaaaaccctgtctctacgaaaaatacaa

SEQ ID NO: 71583 - DNA, 40 bp, Homo sapiens
ttgtatttttcgtagagacagggttttgccatgttgcccg

SEQ ID NO: 71584 - DNA, 40 bp, Homo sapiens
gggcaacatggcaaaaccctgtctctacgaaaaatacaaa

SEQ ID NO: 71585 - DNA, 40 bp, Homo sapiens
tttgtatttttcgtagagacagggttttgccatgttgccc

SEQ ID NO: 71586 - DNA, 40 bp, Homo sapiens
ggcaacatggcaaaaccctgtctctacgaaaaatacaaaa

SEQ ID NO: 71587 - DNA, 40 bp, Homo sapiens
ttttgtatttttcgtagagacagggttttgccatgttgcc

SEQ ID NO: 71588 - DNA, 40 bp, Homo sapiens
gcaacatggcaaaaccctgtctctacgaaaaatacaaaaa

SEQ ID NO: 71589 - DNA, 40 bp, Homo sapiens
tttttgtatttttcgtagagacagggttttgccatgttgc

SEQ ID NO: 71590 - DNA, 40 bp, Homo sapiens
caacatggcaaaaccctgtctctacgaaaaatacaaaaat

SEQ ID NO: 71591 - DNA, 40 bp, Homo sapiens
atttttgtatttttcgtagagacagggttttgccatgttg

SEQ ID NO: 71592 - DNA, 40 bp, Homo sapiens
aacatggcaaaaccctgtctctacgaaaaatacaaaaatc

SEQ ID NO: 71593 - DNA, 40 bp, Homo sapiens
gatttttgtatttttcgtagagacagggttttgccatgtt

SEQ ID NO: 71594 - DNA, 40 bp, Homo sapiens
acatggcaaaaccctgtctctacgaaaaatacaaaaatca

SEQ ID NO: 71595 - DNA, 40 bp, Homo sapiens
tgatttttgtatttttcgtagagacagggttttgccatgt

SEQ ID NO: 71596 - DNA, 40 bp, Homo sapiens
catggcaaaaccctgtctctacgaaaaatacaaaaatcag

SEQ ID NO: 71597 - DNA, 40 bp, Homo sapiens
ctgatttttgtatttttcgtagagacagggttttgccatg

SEQ ID NO: 71598 - DNA, 40 bp, Homo sapiens
atggcaaaaccctgtctctacgaaaaatacaaaaatcagt

SEQ ID NO: 71599 - DNA, 40 bp, Homo sapiens
actgatttttgtatttttcgtagagacagggttttgccat

SEQ ID NO: 71600 - DNA, 40 bp, Homo sapiens
tggcaaaaccctgtctctacgaaaaatacaaaaatcagtc

SEQ ID NO: 71601 - DNA, 40 bp, Homo sapiens
gactgatttttgtatttttcgtagagacagggttttgcca

SEQ ID NO: 71602 - DNA, 40 bp, Homo sapiens
ggcaaaaccctgtctctacgaaaaatacaaaaatcagtca

SEQ ID NO: 71603 - DNA, 40 bp, Homo sapiens
tgactgatttttgtatttttcgtagagacagggttttgcc

SEQ ID NO: 71604 - DNA, 40 bp, Homo sapiens
gcaaaaccctgtctctacgaaaaatacaaaaatcagtcag

SEQ ID NO: 71605 - DNA, 40 bp, Homo sapiens
ctgactgatttttgtatttttcgtagagacagggttttgc

SEQ ID NO: 71606 - DNA, 40 bp, Homo sapiens
caaaaccctgtctctacgaaaaatacaaaaatcagtcagg

SEQ ID NO: 71607 - DNA, 40 bp, Homo sapiens
cctgactgatttttgtatttttcgtagagacagggttttg

SEQ ID NO: 71608 - DNA, 40 bp, Homo sapiens
aaaaccctgtctctacgaaaaatacaaaaatcagtcaggt

SEQ ID NO: 71609 - DNA, 40 bp, Homo sapiens
acctgactgatttttgtatttttcgtagagacagggtttt

SEQ ID NO: 71610 - DNA, 40 bp, Homo sapiens
aaaccctgtctctacgaaaaatacaaaaatcagtcaggtg

SEQ ID NO: 71611 - DNA, 40 bp, Homo sapiens
cacctgactgatttttgtatttttcgtagagacagggttt

SEQ ID NO: 71612 - DNA, 40 bp, Homo sapiens
aaccctgtctctacgaaaaatacaaaaatcagtcaggtgt

SEQ ID NO: 71613 - DNA, 40 bp, Homo sapiens
acacctgactgatttttgtatttttcgtagagacagggtt

SEQ ID NO: 71614 - DNA, 40 bp, Homo sapiens
accctgtctctacgaaaaatacaaaaatcagtcaggtgtg

SEQ ID NO: 71615 - DNA, 40 bp, Homo sapiens
cacacctgactgatttttgtatttttcgtagagacagggt

SEQ ID NO: 71616 - DNA, 40 bp, Homo sapiens
ccctgtctctacgaaaaatacaaaaatcagtcaggtgtgg

SEQ ID NO: 71617 - DNA, 40 bp, Homo sapiens
ccacacctgactgatttttgtatttttcgtagagacaggg

SEQ ID NO: 71618 - DNA, 40 bp, Homo sapiens
cctgtctctacgaaaaatacaaaaatcagtcaggtgtggt

SEQ ID NO: 71619 - DNA, 40 bp, Homo sapiens
accacacctgactgatttttgtatttttcgtagagacagg

SEQ ID NO: 71620 - DNA, 40 bp, Homo sapiens
ctgtctctacgaaaaatacaaaaatcagtcaggtgtggtg

SEQ ID NO: 71621 - DNA, 40 bp, Homo sapiens
caccacacctgactgatttttgtatttttcgtagagacag

SEQ ID NO: 71622 - DNA, 40 bp, Homo sapiens
tgtctctacgaaaaatacaaaaatcagtcaggtgtggtgg

SEQ ID NO: 71623 - DNA, 40 bp, Homo sapiens
ccaccacacctgactgatttttgtatttttcgtagagaca

SEQ ID NO: 71624 - DNA, 40 bp, Homo sapiens
gtctctacgaaaaatacaaaaatcagtcaggtgtggtggt

SEQ ID NO: 71625 - DNA, 40 bp, Homo sapiens
accaccacacctgactgatttttgtatttttcgtagagac

SEQ ID NO: 71626 - DNA, 40 bp, Homo sapiens
tctctacgaaaaatacaaaaatcagtcaggtgtggtggtg

SEQ ID NO: 71627 - DNA, 40 bp, Homo sapiens
caccaccacacctgactgatttttgtatttttcgtagaga

SEQ ID NO: 71628 - DNA, 40 bp, Homo sapiens
ctctacgaaaaatacaaaaatcagtcaggtgtggtggtgc

SEQ ID NO: 71629 - DNA, 40 bp, Homo sapiens
gcaccaccacacctgactgatttttgtatttttcgtagag

SEQ ID NO: 71630 - DNA, 40 bp, Homo sapiens
tctacgaaaaatacaaaaatcagtcaggtgtggtggtgct

SEQ ID NO: 71631 - DNA, 40 bp, Homo sapiens
agcaccaccacacctgactgatttttgtatttttcgtaga

SEQ ID NO: 71632 - DNA, 40 bp, Homo sapiens
ctacgaaaaatacaaaaatcagtcaggtgtggtggtgctt

SEQ ID NO: 71633 - DNA, 40 bp, Homo sapiens
aagcaccaccacacctgactgatttttgtatttttcgtag

SEQ ID NO: 71634 - DNA, 40 bp, Homo sapiens
tacgaaaaatacaaaaatcagtcaggtgtggtggtgcttg

SEQ ID NO: 71635 - DNA, 40 bp, Homo sapiens
caagcaccaccacacctgactgatttttgtatttttcgta

SEQ ID NO: 71636 - DNA, 40 bp, Homo sapiens
acgaaaaatacaaaaatcagtcaggtgtggtggtgcttgc

SEQ ID NO: 71637 - DNA, 40 bp, Homo sapiens
gcaagcaccaccacacctgactgatttttgtatttttcgt

SEQ ID NO: 71638 - DNA, 40 bp, Homo sapiens
cgaaaaatacaaaaatcagtcaggtgtggtggtgcttgcc

SEQ ID NO: 71639 - DNA, 40 bp, Homo sapiens
ggcaagcaccaccacacctgactgatttttgtatttttcg

SEQ ID NO: 71640 - DNA, 40 bp, Homo sapiens
gaaaaatacaaaaatcagtcaggtgtggtggtgcttgcct

SEQ ID NO: 71641 - DNA, 40 bp, Homo sapiens
aggcaagcaccaccacacctgactgatttttgtatttttc

SEQ ID NO: 71642 - DNA, 40 bp, Homo sapiens
aaaaatacaaaaatcagtcaggtgtggtggtgcttgcctg

SEQ ID NO: 71643 - DNA, 40 bp, Homo sapiens
caggcaagcaccaccacacctgactgatttttgtattttt

SEQ ID NO: 71644 - DNA, 40 bp, Homo sapiens
aaaatacaaaaatcagtcaggtgtggtggtgcttgcctgt

SEQ ID NO: 71645 - DNA, 40 bp, Homo sapiens
acaggcaagcaccaccacacctgactgatttttgtatttt

SEQ ID NO: 71646 - DNA, 40 bp, Homo sapiens
aaatacaaaaatcagtcaggtgtggtggtgcttgcctgta

SEQ ID NO: 71647 - DNA, 40 bp, Homo sapiens
tacaggcaagcaccaccacacctgactgatttttgtattt

SEQ ID NO: 71648 - DNA, 40 bp, Homo sapiens
aatacaaaaatcagtcaggtgtggtggtgcttgcctgtag

SEQ ID NO: 71649 - DNA, 40 bp, Homo sapiens
ctacaggcaagcaccaccacacctgactgatttttgtatt

SEQ ID NO: 71650 - DNA, 40 bp, Homo sapiens
atacaaaaatcagtcaggtgtggtggtgcttgcctgtagt

SEQ ID NO: 71651 - DNA, 40 bp, Homo sapiens
actacaggcaagcaccaccacacctgactgatttttgtat

SEQ ID NO: 71652 - DNA, 40 bp, Homo sapiens
tacaaaaatcagtcaggtgtggtggtgcttgcctgtagtc

SEQ ID NO: 71653 - DNA, 40 bp, Homo sapiens
gactacaggcaagcaccaccacacctgactgatttttgta

SEQ ID NO: 71654 - DNA, 40 bp, Homo sapiens
acaaaaatcagtcaggtgtggtggtgcttgcctgtagtcc

SEQ ID NO: 71655 - DNA, 40 bp, Homo sapiens
ggactacaggcaagcaccaccacacctgactgatttttgt

SEQ ID NO: 71656 - DNA, 40 bp, Homo sapiens
caaaaatcagtcaggtgtggtggtgcttgcctgtagtccc

SEQ ID NO: 71657 - DNA, 40 bp, Homo sapiens
gggactacaggcaagcaccaccacacctgactgatttttg

SEQ ID NO: 71658 - DNA, 40 bp, Homo sapiens
aaaaatcagtcaggtgtggtggtgcttgcctgtagtccca

SEQ ID NO: 71659 - DNA, 40 bp, Homo sapiens
tgggactacaggcaagcaccaccacacctgactgattttt

SEQ ID NO: 71660 - DNA, 40 bp, Homo sapiens
aaaatcagtcaggtgtggtggtgcttgcctgtagtcccag

SEQ ID NO: 71661 - DNA, 40 bp, Homo sapiens
ctgggactacaggcaagcaccaccacacctgactgatttt

SEQ ID NO: 71662 - DNA, 40 bp, Homo sapiens
aaatcagtcaggtgtggtggtgcttgcctgtagtcccagc

SEQ ID NO: 71663 - DNA, 40 bp, Homo sapiens
gctgggactacaggcaagcaccaccacacctgactgattt

SEQ ID NO: 71664 - DNA, 40 bp, Homo sapiens
aatcagtcaggtgtggtggtgcttgcctgtagtcccagct

SEQ ID NO: 71665 - DNA, 40 bp, Homo sapiens
agctgggactacaggcaagcaccaccacacctgactgatt

SEQ ID NO: 71666 - DNA, 40 bp, Homo sapiens
atcagtcaggtgtggtggtgcttgcctgtagtcccagcta

SEQ ID NO: 71667 - DNA, 40 bp, Homo sapiens
tagctgggactacaggcaagcaccaccacacctgactgat

SEQ ID NO: 71668 - DNA, 40 bp, Homo sapiens
tcagtcaggtgtggtggtgcttgcctgtagtcccagctat

SEQ ID NO: 71669 - DNA, 40 bp, Homo sapiens
atagctgggactacaggcaagcaccaccacacctgactga

SEQ ID NO: 71670 - DNA, 40 bp, Homo sapiens
cagtcaggtgtggtggtgcttgcctgtagtcccagctatt

SEQ ID NO: 71671 - DNA, 40 bp, Homo sapiens
aatagctgggactacaggcaagcaccaccacacctgactg

SEQ ID NO: 71672 - DNA, 40 bp, Homo sapiens
agtcaggtgtggtggtgcttgcctgtagtcccagctattt

SEQ ID NO: 71673 - DNA, 40 bp, Homo sapiens
aaatagctgggactacaggcaagcaccaccacacctgact

SEQ ID NO: 71674 - DNA, 40 bp, Homo sapiens
gtcaggtgtggtggtgcttgcctgtagtcccagctatttg

SEQ ID NO: 71675 - DNA, 40 bp, Homo sapiens
caaatagctgggactacaggcaagcaccaccacacctgac

SEQ ID NO: 71676 - DNA, 40 bp, Homo sapiens
tcaggtgtggtggtgcttgcctgtagtcccagctatttga

SEQ ID NO: 71677 - DNA, 40 bp, Homo sapiens
tcaaatagctgggactacaggcaagcaccaccacacctga

SEQ ID NO: 71678 - DNA, 40 bp, Homo sapiens
caggtgtggtggtgcttgcctgtagtcccagctatttgag

SEQ ID NO: 71679 - DNA, 40 bp, Homo sapiens
ctcaaatagctgggactacaggcaagcaccaccacacctg

SEQ ID NO: 71680 - DNA, 40 bp, Homo sapiens
aggtgtggtggtgcttgcctgtagtcccagctatttgaga

SEQ ID NO: 71681 - DNA, 40 bp, Homo sapiens
tctcaaatagctgggactacaggcaagcaccaccacacct

SEQ ID NO: 71682 - DNA, 40 bp, Homo sapiens
ggtgtggtggtgcttgcctgtagtcccagctatttgagag

SEQ ID NO: 71683 - DNA, 40 bp, Homo sapiens
ctctcaaatagctgggactacaggcaagcaccaccacacc

SEQ ID NO: 71684 - DNA, 40 bp, Homo sapiens
gtgtggtggtgcttgcctgtagtcccagctatttgagagg

SEQ ID NO: 71685 - DNA, 40 bp, Homo sapiens
cctctcaaatagctgggactacaggcaagcaccaccacac

SEQ ID NO: 71686 - DNA, 40 bp, Homo sapiens
tgtggtggtgcttgcctgtagtcccagctatttgagaggc

SEQ ID NO: 71687 - DNA, 40 bp, Homo sapiens
gcctctcaaatagctgggactacaggcaagcaccaccaca

SEQ ID NO: 71688 - DNA, 40 bp, Homo sapiens
gtggtggtgcttgcctgtagtcccagctatttgagaggct

SEQ ID NO: 71689 - DNA, 40 bp, Homo sapiens
agcctctcaaatagctgggactacaggcaagcaccaccac

SEQ ID NO: 71690 - DNA, 40 bp, Homo sapiens
tggtggtgcttgcctgtagtcccagctatttgagaggctg

SEQ ID NO: 71691 - DNA, 40 bp, Homo sapiens
cagcctctcaaatagctgggactacaggcaagcaccacca

SEQ ID NO: 71692 - DNA, 40 bp, Homo sapiens
ggtggtgcttgcctgtagtcccagctatttgagaggctga

SEQ ID NO: 71693 - DNA, 40 bp, Homo sapiens
tcagcctctcaaatagctgggactacaggcaagcaccacc

SEQ ID NO: 71694 - DNA, 40 bp, Homo sapiens
gtggtgcttgcctgtagtcccagctatttgagaggctgag

SEQ ID NO: 71695 - DNA, 40 bp, Homo sapiens
ctcagcctctcaaatagctgggactacaggcaagcaccac

SEQ ID NO: 71696 - DNA, 40 bp, Homo sapiens
tggtgcttgcctgtagtcccagctatttgagaggctgagg

SEQ ID NO: 71697 - DNA, 40 bp, Homo sapiens
cctcagcctctcaaatagctgggactacaggcaagcacca

SEQ ID NO: 71698 - DNA, 40 bp, Homo sapiens
ggtgcttgcctgtagtcccagctatttgagaggctgaggc

SEQ ID NO: 71699 - DNA, 40 bp, Homo sapiens
gcctcagcctctcaaatagctgggactacaggcaagcacc

SEQ ID NO: 71700 - DNA, 40 bp, Homo sapiens
gtgcttgcctgtagtcccagctatttgagaggctgaggca

SEQ ID NO: 71701 - DNA, 40 bp, Homo sapiens
tgcctcagcctctcaaatagctgggactacaggcaagcac

SEQ ID NO: 71702 - DNA, 40 bp, Homo sapiens
tgcttgcctgtagtcccagctatttgagaggctgaggcag

SEQ ID NO: 71703 - DNA, 40 bp, Homo sapiens
ctgcctcagcctctcaaatagctgggactacaggcaagca

SEQ ID NO: 71704 - DNA, 40 bp, Homo sapiens
gcttgcctgtagtcccagctatttgagaggctgaggcagg

SEQ ID NO: 71705 - DNA, 40 bp, Homo sapiens
cctgcctcagcctctcaaatagctgggactacaggcaagc

SEQ ID NO: 71706 - DNA, 40 bp, Homo sapiens
cttgcctgtagtcccagctatttgagaggctgaggcaggg

SEQ ID NO: 71707 - DNA, 40 bp, Homo sapiens
ccctgcctcagcctctcaaatagctgggactacaggcaag

SEQ ID NO: 71708 - DNA, 40 bp, Homo sapiens
ttgcctgtagtcccagctatttgagaggctgaggcagggg

SEQ ID NO: 71709 - DNA, 40 bp, Homo sapiens
cccctgcctcagcctctcaaatagctgggactacaggcaa

SEQ ID NO: 71710 - DNA, 40 bp, Homo sapiens
tgcctgtagtcccagctatttgagaggctgaggcaggggg

SEQ ID NO: 71711 - DNA, 40 bp, Homo sapiens
ccccctgcctcagcctctcaaatagctgggactacaggca

SEQ ID NO: 71712 - DNA, 40 bp, Homo sapiens
gcctgtagtcccagctatttgagaggctgaggcaggggga

SEQ ID NO: 71713 - DNA, 40 bp, Homo sapiens
tccccctgcctcagcctctcaaatagctgggactacaggc

SEQ ID NO: 71714 - DNA, 40 bp, Homo sapiens
cctgtagtcccagctatttgagaggctgaggcagggggat

SEQ ID NO: 71715 - DNA, 40 bp, Homo sapiens
atccccctgcctcagcctctcaaatagctgggactacagg

SEQ ID NO: 71716 - DNA, 40 bp, Homo sapiens
ctgtagtcccagctatttgagaggctgaggcagggggatc

SEQ ID NO: 71717 - DNA, 40 bp, Homo sapiens
gatccccctgcctcagcctctcaaatagctgggactacag

SEQ ID NO: 71718 - DNA, 40 bp, Homo sapiens
tgtagtcccagctatttgagaggctgaggcagggggatca

SEQ ID NO: 71719 - DNA, 40 bp, Homo sapiens
tgatccccctgcctcagcctctcaaatagctgggactaca

SEQ ID NO: 71720 - DNA, 40 bp, Homo sapiens
gtagtcccagctatttgagaggctgaggcagggggatcac

SEQ ID NO: 71721 - DNA, 40 bp, Homo sapiens
gtgatccccctgcctcagcctctcaaatagctgggactac

SEQ ID NO: 71722 - DNA, 40 bp, Homo sapiens
tagtcccagctatttgagaggctgaggcagggggatcacc

SEQ ID NO: 71723 - DNA, 40 bp, Homo sapiens
ggtgatccccctgcctcagcctctcaaatagctgggacta

SEQ ID NO: 71724 - DNA, 40 bp, Homo sapiens
agtcccagctatttgagaggctgaggcagggggatcacct

SEQ ID NO: 71725 - DNA, 40 bp, Homo sapiens
aggtgatccccctgcctcagcctctcaaatagctgggact

SEQ ID NO: 71726 - DNA, 40 bp, Homo sapiens
gtcccagctatttgagaggctgaggcagggggatcaccta

SEQ ID NO: 71727 - DNA, 40 bp, Homo sapiens
taggtgatccccctgcctcagcctctcaaatagctgggac

SEQ ID NO: 71728 - DNA, 40 bp, Homo sapiens
tcccagctatttgagaggctgaggcagggggatcacctag

SEQ ID NO: 71729 - DNA, 40 bp, Homo sapiens
ctaggtgatccccctgcctcagcctctcaaatagctggga

SEQ ID NO: 71730 - DNA, 40 bp, Homo sapiens
cccagctatttgagaggctgaggcagggggatcacctagc

SEQ ID NO: 71731 - DNA, 40 bp, Homo sapiens
gctaggtgatccccctgcctcagcctctcaaatagctggg

SEQ ID NO: 71732 - DNA, 40 bp, Homo sapiens
ccagctatttgagaggctgaggcagggggatcacctagcc

SEQ ID NO: 71733 - DNA, 40 bp, Homo sapiens
ggctaggtgatccccctgcctcagcctctcaaatagctgg

SEQ ID NO: 71734 - DNA, 40 bp, Homo sapiens
cagctatttgagaggctgaggcagggggatcacctagcct

SEQ ID NO: 71735 - DNA, 40 bp, Homo sapiens
aggctaggtgatccccctgcctcagcctctcaaatagctg

SEQ ID NO: 71736 - DNA, 40 bp, Homo sapiens
agctatttgagaggctgaggcagggggatcacctagcctg

SEQ ID NO: 71737 - DNA, 40 bp, Homo sapiens
caggctaggtgatccccctgcctcagcctctcaaatagct

SEQ ID NO: 71738 - DNA, 40 bp, Homo sapiens
gctatttgagaggctgaggcagggggatcacctagcctgg

SEQ ID NO: 71739 - DNA, 40 bp, Homo sapiens
ccaggctaggtgatccccctgcctcagcctctcaaatagc

SEQ ID NO: 71740 - DNA, 40 bp, Homo sapiens
ctatttgagaggctgaggcagggggatcacctagcctggg

SEQ ID NO: 71741 - DNA, 40 bp, Homo sapiens
cccaggctaggtgatccccctgcctcagcctctcaaatag

SEQ ID NO: 71742 - DNA, 40 bp, Homo sapiens
tatttgagaggctgaggcagggggatcacctagcctggga

SEQ ID NO: 71743 - DNA, 40 bp, Homo sapiens
tcccaggctaggtgatccccctgcctcagcctctcaaata

SEQ ID NO: 71744 - DNA, 40 bp, Homo sapiens
atttgagaggctgaggcagggggatcacctagcctgggag

SEQ ID NO: 71745 - DNA, 40 bp, Homo sapiens
ctcccaggctaggtgatccccctgcctcagcctctcaaat

SEQ ID NO: 71746 - DNA, 40 bp, Homo sapiens
tttgagaggctgaggcagggggatcacctagcctgggagg

SEQ ID NO: 71747 - DNA, 40 bp, Homo sapiens
cctcccaggctaggtgatccccctgcctcagcctctcaaa

SEQ ID NO: 71748 - DNA, 40 bp, Homo sapiens
ttgagaggctgaggcagggggatcacctagcctgggaggt

SEQ ID NO: 71749 - DNA, 40 bp, Homo sapiens
acctcccaggctaggtgatccccctgcctcagcctctcaa

SEQ ID NO: 71750 - DNA, 40 bp, Homo sapiens
tgagaggctgaggcagggggatcacctagcctgggaggtc

SEQ ID NO: 71751 - DNA, 40 bp, Homo sapiens
gacctcccaggctaggtgatccccctgcctcagcctctca

SEQ ID NO: 71752 - DNA, 40 bp, Homo sapiens
gagaggctgaggcagggggatcacctagcctgggaggtcg

SEQ ID NO: 71753 - DNA, 40 bp, Homo sapiens
cgacctcccaggctaggtgatccccctgcctcagcctctc

SEQ ID NO: 71754 - DNA, 40 bp, Homo sapiens
agaggctgaggcagggggatcacctagcctgggaggtcga

SEQ ID NO: 71755 - DNA, 40 bp, Homo sapiens
tcgacctcccaggctaggtgatccccctgcctcagcctct

SEQ ID NO: 71756 - DNA, 40 bp, Homo sapiens
gaggctgaggcagggggatcacctagcctgggaggtcgag

SEQ ID NO: 71757 - DNA, 40 bp, Homo sapiens
ctcgacctcccaggctaggtgatccccctgcctcagcctc

SEQ ID NO: 71758 - DNA, 40 bp, Homo sapiens
aggctgaggcagggggatcacctagcctgggaggtcgagg

SEQ ID NO: 71759 - DNA, 40 bp, Homo sapiens
cctcgacctcccaggctaggtgatccccctgcctcagcct

SEQ ID NO: 71760 - DNA, 40 bp, Homo sapiens
ggctgaggcagggggatcacctagcctgggaggtcgaggc

SEQ ID NO: 71761 - DNA, 40 bp, Homo sapiens
gcctcgacctcccaggctaggtgatccccctgcctcagcc

SEQ ID NO: 71762 - DNA, 40 bp, Homo sapiens
gctgaggcagggggatcacctagcctgggaggtcgaggct

SEQ ID NO: 71763 - DNA, 40 bp, Homo sapiens
agcctcgacctcccaggctaggtgatccccctgcctcagc

SEQ ID NO: 71764 - DNA, 40 bp, Homo sapiens
ctgaggcagggggatcacctagcctgggaggtcgaggctg

SEQ ID NO: 71765 - DNA, 40 bp, Homo sapiens
cagcctcgacctcccaggctaggtgatccccctgcctcag

SEQ ID NO: 71766 - DNA, 40 bp, Homo sapiens
tgaggcagggggatcacctagcctgggaggtcgaggctgc

SEQ ID NO: 71767 - DNA, 40 bp, Homo sapiens
gcagcctcgacctcccaggctaggtgatccccctgcctca

SEQ ID NO: 71768 - DNA, 40 bp, Homo sapiens
gaggcagggggatcacctagcctgggaggtcgaggctgca

SEQ ID NO: 71769 - DNA, 40 bp, Homo sapiens
tgcagcctcgacctcccaggctaggtgatccccctgcctc

SEQ ID NO: 71770 - DNA, 40 bp, Homo sapiens
aggcagggggatcacctagcctgggaggtcgaggctgcag

SEQ ID NO: 71771 - DNA, 40 bp, Homo sapiens
ctgcagcctcgacctcccaggctaggtgatccccctgcct

SEQ ID NO: 71772 - DNA, 40 bp, Homo sapiens
ggcagggggatcacctagcctgggaggtcgaggctgcagt

SEQ ID NO: 71773 - DNA, 40 bp, Homo sapiens
actgcagcctcgacctcccaggctaggtgatccccctgcc

SEQ ID NO: 71774 - DNA, 40 bp, Homo sapiens
gcagggggatcacctagcctgggaggtcgaggctgcagtc

SEQ ID NO: 71775 - DNA, 40 bp, Homo sapiens
gactgcagcctcgacctcccaggctaggtgatccccctgc

SEQ ID NO: 71776 - DNA, 40 bp, Homo sapiens
cagggggatcacctagcctgggaggtcgaggctgcagtca

SEQ ID NO: 71777 - DNA, 40 bp, Homo sapiens
tgactgcagcctcgacctcccaggctaggtgatccccctg

SEQ ID NO: 71778 - DNA, 40 bp, Homo sapiens
agggggatcacctagcctgggaggtcgaggctgcagtcat

SEQ ID NO: 71779 - DNA, 40 bp, Homo sapiens
atgactgcagcctcgacctcccaggctaggtgatccccct

SEQ ID NO: 71780 - DNA, 40 bp, Homo sapiens
gggggatcacctagcctgggaggtcgaggctgcagtcatg

SEQ ID NO: 71781 - DNA, 40 bp, Homo sapiens
catgactgcagcctcgacctcccaggctaggtgatccccc

SEQ ID NO: 71782 - DNA, 40 bp, Homo sapiens
ggggatcacctagcctgggaggtcgaggctgcagtcatga

SEQ ID NO: 71783 - DNA, 40 bp, Homo sapiens
tcatgactgcagcctcgacctcccaggctaggtgatcccc

SEQ ID NO: 71784 - DNA, 40 bp, Homo sapiens
gggatcacctagcctgggaggtcgaggctgcagtcatgat

SEQ ID NO: 71785 - DNA, 40 bp, Homo sapiens
atcatgactgcagcctcgacctcccaggctaggtgatccc

SEQ ID NO: 71786 - DNA, 40 bp, Homo sapiens
ggatcacctagcctgggaggtcgaggctgcagtcatgatc

SEQ ID NO: 71787 - DNA, 40 bp, Homo sapiens
gatcatgactgcagcctcgacctcccaggctaggtgatcc

SEQ ID NO: 71788 - DNA, 40 bp, Homo sapiens
gatcacctagcctgggaggtcgaggctgcagtcatgatcg

SEQ ID NO: 71789 - DNA, 40 bp, Homo sapiens
cgatcatgactgcagcctcgacctcccaggctaggtgatc

SEQ ID NO: 71790 - DNA, 40 bp, Homo sapiens
atcacctagcctgggaggtcgaggctgcagtcatgatcgt

SEQ ID NO: 71791 - DNA, 40 bp, Homo sapiens
acgatcatgactgcagcctcgacctcccaggctaggtgat

SEQ ID NO: 71792 - DNA, 40 bp, Homo sapiens
tcacctagcctgggaggtcgaggctgcagtcatgatcgtg

SEQ ID NO: 71793 - DNA, 40 bp, Homo sapiens
cacgatcatgactgcagcctcgacctcccaggctaggtga

SEQ ID NO: 71794 - DNA, 40 bp, Homo sapiens
cacctagcctgggaggtcgaggctgcagtcatgatcgtgc

SEQ ID NO: 71795 - DNA, 40 bp, Homo sapiens
gcacgatcatgactgcagcctcgacctcccaggctaggtg

SEQ ID NO: 71796 - DNA, 40 bp, Homo sapiens
acctagcctgggaggtcgaggctgcagtcatgatcgtgcc

SEQ ID NO: 71797 - DNA, 40 bp, Homo sapiens
ggcacgatcatgactgcagcctcgacctcccaggctaggt

SEQ ID NO: 71798 - DNA, 40 bp, Homo sapiens
cctagcctgggaggtcgaggctgcagtcatgatcgtgcca

SEQ ID NO: 71799 - DNA, 40 bp, Homo sapiens
tggcacgatcatgactgcagcctcgacctcccaggctagg

SEQ ID NO: 71800 - DNA, 40 bp, Homo sapiens
ctagcctgggaggtcgaggctgcagtcatgatcgtgccat

SEQ ID NO: 71801 - DNA, 40 bp, Homo sapiens
atggcacgatcatgactgcagcctcgacctcccaggctag

SEQ ID NO: 71802 - DNA, 40 bp, Homo sapiens
tagcctgggaggtcgaggctgcagtcatgatcgtgccatt

SEQ ID NO: 71803 - DNA, 40 bp, Homo sapiens
aatggcacgatcatgactgcagcctcgacctcccaggcta

SEQ ID NO: 71804 - DNA, 40 bp, Homo sapiens
agcctgggaggtcgaggctgcagtcatgatcgtgccattg

SEQ ID NO: 71805 - DNA, 40 bp, Homo sapiens
caatggcacgatcatgactgcagcctcgacctcccaggct

SEQ ID NO: 71806 - DNA, 40 bp, Homo sapiens
gcctgggaggtcgaggctgcagtcatgatcgtgccattgc

SEQ ID NO: 71807 - DNA, 40 bp, Homo sapiens
gcaatggcacgatcatgactgcagcctcgacctcccaggc

SEQ ID NO: 71808 - DNA, 40 bp, Homo sapiens
cctgggaggtcgaggctgcagtcatgatcgtgccattgca

SEQ ID NO: 71809 - DNA, 40 bp, Homo sapiens
tgcaatggcacgatcatgactgcagcctcgacctcccagg

SEQ ID NO: 71810 - DNA, 40 bp, Homo sapiens
ctgggaggtcgaggctgcagtcatgatcgtgccattgcac

SEQ ID NO: 71811 - DNA, 40 bp, Homo sapiens
gtgcaatggcacgatcatgactgcagcctcgacctcccag

SEQ ID NO: 71812 - DNA, 40 bp, Homo sapiens
tgggaggtcgaggctgcagtcatgatcgtgccattgcact

SEQ ID NO: 71813 - DNA, 40 bp, Homo sapiens
agtgcaatggcacgatcatgactgcagcctcgacctccca

SEQ ID NO: 71814 - DNA, 40 bp, Homo sapiens
gggaggtcgaggctgcagtcatgatcgtgccattgcactc

SEQ ID NO: 71815 - DNA, 40 bp, Homo sapiens
gagtgcaatggcacgatcatgactgcagcctcgacctccc

SEQ ID NO: 71816 - DNA, 40 bp, Homo sapiens
ggaggtcgaggctgcagtcatgatcgtgccattgcactcc

SEQ ID NO: 71817 - DNA, 40 bp, Homo sapiens
ggagtgcaatggcacgatcatgactgcagcctcgacctcc

SEQ ID NO: 71818 - DNA, 40 bp, Homo sapiens
gaggtcgaggctgcagtcatgatcgtgccattgcactcca

SEQ ID NO: 71819 - DNA, 40 bp, Homo sapiens
tggagtgcaatggcacgatcatgactgcagcctcgacctc

SEQ ID NO: 71820 - DNA, 40 bp, Homo sapiens
aggtcgaggctgcagtcatgatcgtgccattgcactccat

SEQ ID NO: 71821 - DNA, 40 bp, Homo sapiens
atggagtgcaatggcacgatcatgactgcagcctcgacct

SEQ ID NO: 71822 - DNA, 40 bp, Homo sapiens
ggtcgaggctgcagtcatgatcgtgccattgcactccatc

SEQ ID NO: 71823 - DNA, 40 bp, Homo sapiens
gatggagtgcaatggcacgatcatgactgcagcctcgacc

SEQ ID NO: 71824 - DNA, 40 bp, Homo sapiens
gtcgaggctgcagtcatgatcgtgccattgcactccatcc

SEQ ID NO: 71825 - DNA, 40 bp, Homo sapiens
ggatggagtgcaatggcacgatcatgactgcagcctcgac

SEQ ID NO: 71826 - DNA, 40 bp, Homo sapiens
tcgaggctgcagtcatgatcgtgccattgcactccatcct

SEQ ID NO: 71827 - DNA, 40 bp, Homo sapiens
aggatggagtgcaatggcacgatcatgactgcagcctcga

SEQ ID NO: 71828 - DNA, 40 bp, Homo sapiens
cgaggctgcagtcatgatcgtgccattgcactccatcctg

SEQ ID NO: 71829 - DNA, 40 bp, Homo sapiens
caggatggagtgcaatggcacgatcatgactgcagcctcg

SEQ ID NO: 71830 - DNA, 40 bp, Homo sapiens
gaggctgcagtcatgatcgtgccattgcactccatcctgg

SEQ ID NO: 71831 - DNA, 40 bp, Homo sapiens
ccaggatggagtgcaatggcacgatcatgactgcagcctc

SEQ ID NO: 71832 - DNA, 40 bp, Homo sapiens
aggctgcagtcatgatcgtgccattgcactccatcctggg

SEQ ID NO: 71833 - DNA, 40 bp, Homo sapiens
cccaggatggagtgcaatggcacgatcatgactgcagcct

SEQ ID NO: 71834 - DNA, 40 bp, Homo sapiens
ggctgcagtcatgatcgtgccattgcactccatcctgggc

SEQ ID NO: 71835 - DNA, 40 bp, Homo sapiens
gcccaggatggagtgcaatggcacgatcatgactgcagcc

SEQ ID NO: 71836 - DNA, 40 bp, Homo sapiens
gctgcagtcatgatcgtgccattgcactccatcctgggca

SEQ ID NO: 71837 - DNA, 40 bp, Homo sapiens
tgcccaggatggagtgcaatggcacgatcatgactgcagc

SEQ ID NO: 71838 - DNA, 40 bp, Homo sapiens
ctgcagtcatgatcgtgccattgcactccatcctgggcaa

SEQ ID NO: 71839 - DNA, 40 bp, Homo sapiens
ttgcccaggatggagtgcaatggcacgatcatgactgcag

SEQ ID NO: 71840 - DNA, 40 bp, Homo sapiens
tgcagtcatgatcgtgccattgcactccatcctgggcaac

SEQ ID NO: 71841 - DNA, 40 bp, Homo sapiens
gttgcccaggatggagtgcaatggcacgatcatgactgca

SEQ ID NO: 71842 - DNA, 40 bp, Homo sapiens
gcagtcatgatcgtgccattgcactccatcctgggcaacc

SEQ ID NO: 71843 - DNA, 40 bp, Homo sapiens
ggttgcccaggatggagtgcaatggcacgatcatgactgc

SEQ ID NO: 71844 - DNA, 40 bp, Homo sapiens
cagtcatgatcgtgccattgcactccatcctgggcaaccc

SEQ ID NO: 71845 - DNA, 40 bp, Homo sapiens
gggttgcccaggatggagtgcaatggcacgatcatgactg

SEQ ID NO: 71846 - DNA, 40 bp, Homo sapiens
agtcatgatcgtgccattgcactccatcctgggcaaccca

SEQ ID NO: 71847 - DNA, 40 bp, Homo sapiens
tgggttgcccaggatggagtgcaatggcacgatcatgact

SEQ ID NO: 71848 - DNA, 40 bp, Homo sapiens
gtcatgatcgtgccattgcactccatcctgggcaacccag

SEQ ID NO: 71849 - DNA, 40 bp, Homo sapiens
ctgggttgcccaggatggagtgcaatggcacgatcatgac

SEQ ID NO: 71850 - DNA, 40 bp, Homo sapiens
tcatgatcgtgccattgcactccatcctgggcaacccagt

SEQ ID NO: 71851 - DNA, 40 bp, Homo sapiens
actgggttgcccaggatggagtgcaatggcacgatcatga

SEQ ID NO: 71852 - DNA, 40 bp, Homo sapiens
catgatcgtgccattgcactccatcctgggcaacccagtg

SEQ ID NO: 71853 - DNA, 40 bp, Homo sapiens
cactgggttgcccaggatggagtgcaatggcacgatcatg

SEQ ID NO: 71854 - DNA, 40 bp, Homo sapiens
atgatcgtgccattgcactccatcctgggcaacccagtga

SEQ ID NO: 71855 - DNA, 40 bp, Homo sapiens
tcactgggttgcccaggatggagtgcaatggcacgatcat

SEQ ID NO: 71856 - DNA, 40 bp, Homo sapiens
tgatcgtgccattgcactccatcctgggcaacccagtgag

SEQ ID NO: 71857 - DNA, 40 bp, Homo sapiens
ctcactgggttgcccaggatggagtgcaatggcacgatca

SEQ ID NO: 71858 - DNA, 40 bp, Homo sapiens
gatcgtgccattgcactccatcctgggcaacccagtgaga

SEQ ID NO: 71859 - DNA, 40 bp, Homo sapiens
tctcactgggttgcccaggatggagtgcaatggcacgatc

SEQ ID NO: 71860 - DNA, 40 bp, Homo sapiens
atcgtgccattgcactccatcctgggcaacccagtgagac

SEQ ID NO: 71861 - DNA, 40 bp, Homo sapiens
gtctcactgggttgcccaggatggagtgcaatggcacgat

SEQ ID NO: 71862 - DNA, 40 bp, Homo sapiens
tcgtgccattgcactccatcctgggcaacccagtgagacc

SEQ ID NO: 71863 - DNA, 40 bp, Homo sapiens
ggtctcactgggttgcccaggatggagtgcaatggcacga

SEQ ID NO: 71864 - DNA, 40 bp, Homo sapiens
cgtgccattgcactccatcctgggcaacccagtgagaccc

SEQ ID NO: 71865 - DNA, 40 bp, Homo sapiens
gggtctcactgggttgcccaggatggagtgcaatggcacg

SEQ ID NO: 71866 - DNA, 40 bp, Homo sapiens
gtgccattgcactccatcctgggcaacccagtgagaccct

SEQ ID NO: 71867 - DNA, 40 bp, Homo sapiens
agggtctcactgggttgcccaggatggagtgcaatggcac

SEQ ID NO: 71868 - DNA, 40 bp, Homo sapiens
tgccattgcactccatcctgggcaacccagtgagaccctg

SEQ ID NO: 71869 - DNA, 40 bp, Homo sapiens
cagggtctcactgggttgcccaggatggagtgcaatggca

SEQ ID NO: 71870 - DNA, 40 bp, Homo sapiens
gccattgcactccatcctgggcaacccagtgagaccctgt

SEQ ID NO: 71871 - DNA, 40 bp, Homo sapiens
acagggtctcactgggttgcccaggatggagtgcaatggc

SEQ ID NO: 71872 - DNA, 40 bp, Homo sapiens
ccattgcactccatcctgggcaacccagtgagaccctgtc

SEQ ID NO: 71873 - DNA, 40 bp, Homo sapiens
gacagggtctcactgggttgcccaggatggagtgcaatgg

SEQ ID NO: 71874 - DNA, 40 bp, Homo sapiens
cattgcactccatcctgggcaacccagtgagaccctgtct

SEQ ID NO: 71875 - DNA, 40 bp, Homo sapiens
agacagggtctcactgggttgcccaggatggagtgcaatg

SEQ ID NO: 71876 - DNA, 40 bp, Homo sapiens
attgcactccatcctgggcaacccagtgagaccctgtctc

SEQ ID NO: 71877 - DNA, 40 bp, Homo sapiens
gagacagggtctcactgggttgcccaggatggagtgcaat

SEQ ID NO: 71878 - DNA, 40 bp, Homo sapiens
ttgcactccatcctgggcaacccagtgagaccctgtctct

SEQ ID NO: 71879 - DNA, 40 bp, Homo sapiens
agagacagggtctcactgggttgcccaggatggagtgcaa

SEQ ID NO: 71880 - DNA, 40 bp, Homo sapiens
tgcactccatcctgggcaacccagtgagaccctgtctcta

SEQ ID NO: 71881 - DNA, 40 bp, Homo sapiens
tagagacagggtctcactgggttgcccaggatggagtgca

SEQ ID NO: 71882 - DNA, 40 bp, Homo sapiens
gcactccatcctgggcaacccagtgagaccctgtctctaa

SEQ ID NO: 71883 - DNA, 40 bp, Homo sapiens
ttagagacagggtctcactgggttgcccaggatggagtgc

SEQ ID NO: 71884 - DNA, 40 bp, Homo sapiens
cactccatcctgggcaacccagtgagaccctgtctctaaa

SEQ ID NO: 71885 - DNA, 40 bp, Homo sapiens
tttagagacagggtctcactgggttgcccaggatggagtg

SEQ ID NO: 71886 - DNA, 40 bp, Homo sapiens
actccatcctgggcaacccagtgagaccctgtctctaaaa

SEQ ID NO: 71887 - DNA, 40 bp, Homo sapiens
ttttagagacagggtctcactgggttgcccaggatggagt

SEQ ID NO: 71888 - DNA, 40 bp, Homo sapiens
ctccatcctgggcaacccagtgagaccctgtctctaaaac

SEQ ID NO: 71889 - DNA, 40 bp, Homo sapiens
gttttagagacagggtctcactgggttgcccaggatggag

SEQ ID NO: 71890 - DNA, 40 bp, Homo sapiens
tccatcctgggcaacccagtgagaccctgtctctaaaaca

SEQ ID NO: 71891 - DNA, 40 bp, Homo sapiens
tgttttagagacagggtctcactgggttgcccaggatgga

SEQ ID NO: 71892 - DNA, 40 bp, Homo sapiens
ccatcctgggcaacccagtgagaccctgtctctaaaacaa

SEQ ID NO: 71893 - DNA, 40 bp, Homo sapiens
ttgttttagagacagggtctcactgggttgcccaggatgg

SEQ ID NO: 71894 - DNA, 40 bp, Homo sapiens
catcctgggcaacccagtgagaccctgtctctaaaacaaa

SEQ ID NO: 71895 - DNA, 40 bp, Homo sapiens
tttgttttagagacagggtctcactgggttgcccaggatg

SEQ ID NO: 71896 - DNA, 40 bp, Homo sapiens
atcctgggcaacccagtgagaccctgtctctaaaacaaaa

SEQ ID NO: 71897 - DNA, 40 bp, Homo sapiens
ttttgttttagagacagggtctcactgggttgcccaggat

SEQ ID NO: 71898 - DNA, 40 bp, Homo sapiens
tcctgggcaacccagtgagaccctgtctctaaaacaaaaa

SEQ ID NO: 71899 - DNA, 40 bp, Homo sapiens
tttttgttttagagacagggtctcactgggttgcccagga

SEQ ID NO: 71900 - DNA, 40 bp, Homo sapiens
cctgggcaacccagtgagaccctgtctctaaaacaaaaaa

SEQ ID NO: 71901 - DNA, 40 bp, Homo sapiens
ttttttgttttagagacagggtctcactgggttgcccagg

SEQ ID NO: 71902 - DNA, 40 bp, Homo sapiens
ctgggcaacccagtgagaccctgtctctaaaacaaaaaaa

SEQ ID NO: 71903 - DNA, 40 bp, Homo sapiens
tttttttgttttagagacagggtctcactgggttgcccag

SEQ ID NO: 71904 - DNA, 40 bp, Homo sapiens
tgggcaacccagtgagaccctgtctctaaaacaaaaaaat

SEQ ID NO: 71905 - DNA, 40 bp, Homo sapiens
atttttttgttttagagacagggtctcactgggttgccca

SEQ ID NO: 71906 - DNA, 40 bp, Homo sapiens
gggcaacccagtgagaccctgtctctaaaacaaaaaaata

SEQ ID NO: 71907 - DNA, 40 bp, Homo sapiens
tatttttttgttttagagacagggtctcactgggttgccc

SEQ ID NO: 71908 - DNA, 40 bp, Homo sapiens
ggcaacccagtgagaccctgtctctaaaacaaaaaaataa

SEQ ID NO: 71909 - DNA, 40 bp, Homo sapiens
ttatttttttgttttagagacagggtctcactgggttgcc

SEQ ID NO: 71910 - DNA, 40 bp, Homo sapiens
gcaacccagtgagaccctgtctctaaaacaaaaaaataaa

SEQ ID NO: 71911 - DNA, 40 bp, Homo sapiens
tttatttttttgttttagagacagggtctcactgggttgc

SEQ ID NO: 71912 - DNA, 40 bp, Homo sapiens
caacccagtgagaccctgtctctaaaacaaaaaaataaaa

SEQ ID NO: 71913 - DNA, 40 bp, Homo sapiens
ttttatttttttgttttagagacagggtctcactgggttg

SEQ ID NO: 71914 - DNA, 40 bp, Homo sapiens
aacccagtgagaccctgtctctaaaacaaaaaaataaaaa

SEQ ID NO: 71915 - DNA, 40 bp, Homo sapiens
tttttatttttttgttttagagacagggtctcactgggtt

SEQ ID NO: 71916 - DNA, 40 bp, Homo sapiens
acccagtgagaccctgtctctaaaacaaaaaaataaaaaa

SEQ ID NO: 71917 - DNA, 40 bp, Homo sapiens
ttttttatttttttgttttagagacagggtctcactgggt

SEQ ID NO: 71918 - DNA, 40 bp, Homo sapiens
cccagtgagaccctgtctctaaaacaaaaaaataaaaaaa

SEQ ID NO: 71919 - DNA, 40 bp, Homo sapiens
tttttttatttttttgttttagagacagggtctcactggg

SEQ ID NO: 71920 - DNA, 40 bp, Homo sapiens
ccagtgagaccctgtctctaaaacaaaaaaataaaaaaag

SEQ ID NO: 71921 - DNA, 40 bp, Homo sapiens
ctttttttatttttttgttttagagacagggtctcactgg

SEQ ID NO: 71922 - DNA, 40 bp, Homo sapiens
cagtgagaccctgtctctaaaacaaaaaaataaaaaaaga

SEQ ID NO: 71923 - DNA, 40 bp, Homo sapiens
tctttttttatttttttgttttagagacagggtctcactg

SEQ ID NO: 71924 - DNA, 40 bp, Homo sapiens
agtgagaccctgtctctaaaacaaaaaaataaaaaaagaa

SEQ ID NO: 71925 - DNA, 40 bp, Homo sapiens
ttctttttttatttttttgttttagagacagggtctcact

SEQ ID NO: 71926 - DNA, 40 bp, Homo sapiens
gtgagaccctgtctctaaaacaaaaaaataaaaaaagaac

SEQ ID NO: 71927 - DNA, 40 bp, Homo sapiens
gttctttttttatttttttgttttagagacagggtctcac

SEQ ID NO: 71928 - DNA, 40 bp, Homo sapiens
tgagaccctgtctctaaaacaaaaaaataaaaaaagaact

SEQ ID NO: 71929 - DNA, 40 bp, Homo sapiens
agttctttttttatttttttgttttagagacagggtctca

SEQ ID NO: 71930 - DNA, 40 bp, Homo sapiens
gagaccctgtctctaaaacaaaaaaataaaaaaagaactt

SEQ ID NO: 71931 - DNA, 40 bp, Homo sapiens
aagttctttttttatttttttgttttagagacagggtctc

SEQ ID NO: 71932 - DNA, 40 bp, Homo sapiens
agaccctgtctctaaaacaaaaaaataaaaaaagaacttg

SEQ ID NO: 71933 - DNA, 40 bp, Homo sapiens
caagttctttttttatttttttgttttagagacagggtct

SEQ ID NO: 71934 - DNA, 40 bp, Homo sapiens
gaccctgtctctaaaacaaaaaaataaaaaaagaacttgt

SEQ ID NO: 71935 - DNA, 40 bp, Homo sapiens
acaagttctttttttatttttttgttttagagacagggtc

SEQ ID NO: 71936 - DNA, 40 bp, Homo sapiens
accctgtctctaaaacaaaaaaataaaaaaagaacttgta

SEQ ID NO: 71937 - DNA, 40 bp, Homo sapiens
tacaagttctttttttatttttttgttttagagacagggt

SEQ ID NO: 71938 - DNA, 40 bp, Homo sapiens
ccctgtctctaaaacaaaaaaataaaaaaagaacttgtag

SEQ ID NO: 71939 - DNA, 40 bp, Homo sapiens
ctacaagttctttttttatttttttgttttagagacaggg

SEQ ID NO: 71940 - DNA, 40 bp, Homo sapiens
cctgtctctaaaacaaaaaaataaaaaaagaacttgtagt

SEQ ID NO: 71941 - DNA, 40 bp, Homo sapiens
actacaagttctttttttatttttttgttttagagacagg

SEQ ID NO: 71942 - DNA, 40 bp, Homo sapiens
ctgtctctaaaacaaaaaaataaaaaaagaacttgtagta

SEQ ID NO: 71943 - DNA, 40 bp, Homo sapiens
tactacaagttctttttttatttttttgttttagagacag

SEQ ID NO: 71944 - DNA, 40 bp, Homo sapiens
tgtctctaaaacaaaaaaataaaaaaagaacttgtagtaa

SEQ ID NO: 71945 - DNA, 40 bp, Homo sapiens
ttactacaagttctttttttatttttttgttttagagaca

SEQ ID NO: 71946 - DNA, 40 bp, Homo sapiens
gtctctaaaacaaaaaaataaaaaaagaacttgtagtaag

SEQ ID NO: 71947 - DNA, 40 bp, Homo sapiens
cttactacaagttctttttttatttttttgttttagagac

SEQ ID NO: 71948 - DNA, 40 bp, Homo sapiens
tctctaaaacaaaaaaataaaaaaagaacttgtagtaagg

SEQ ID NO: 71949 - DNA, 40 bp, Homo sapiens
ccttactacaagttctttttttatttttttgttttagaga

SEQ ID NO: 71950 - DNA, 40 bp, Homo sapiens
ctctaaaacaaaaaaataaaaaaagaacttgtagtaagga

SEQ ID NO: 71951 - DNA, 40 bp, Homo sapiens
tccttactacaagttctttttttatttttttgttttagag

SEQ ID NO: 71952 - DNA, 40 bp, Homo sapiens
tctaaaacaaaaaaataaaaaaagaacttgtagtaaggat

SEQ ID NO: 71953 - DNA, 40 bp, Homo sapiens
atccttactacaagttctttttttatttttttgttttaga

SEQ ID NO: 71954 - DNA, 40 bp, Homo sapiens
ctaaaacaaaaaaataaaaaaagaacttgtagtaaggata

SEQ ID NO: 71955 - DNA, 40 bp, Homo sapiens
tatccttactacaagttctttttttatttttttgttttag

SEQ ID NO: 71956 - DNA, 40 bp, Homo sapiens
taaaacaaaaaaataaaaaaagaacttgtagtaaggatac

SEQ ID NO: 71957 - DNA, 40 bp, Homo sapiens
gtatccttactacaagttctttttttatttttttgtttta

SEQ ID NO: 71958 - DNA, 40 bp, Homo sapiens
aaaacaaaaaaataaaaaaagaacttgtagtaaggataca

SEQ ID NO: 71959 - DNA, 40 bp, Homo sapiens
tgtatccttactacaagttctttttttatttttttgtttt

SEQ ID NO: 71960 - DNA, 40 bp, Homo sapiens
aaacaaaaaaataaaaaaagaacttgtagtaaggatacaa

SEQ ID NO: 71961 - DNA, 40 bp, Homo sapiens
ttgtatccttactacaagttctttttttatttttttgttt

SEQ ID NO: 71962 - DNA, 40 bp, Homo sapiens
aacaaaaaaataaaaaaagaacttgtagtaaggatacaaa

SEQ ID NO: 71963 - DNA, 40 bp, Homo sapiens
tttgtatccttactacaagttctttttttatttttttgtt

SEQ ID NO: 71964 - DNA, 40 bp, Homo sapiens
acaaaaaaataaaaaaagaacttgtagtaaggatacaaaa

SEQ ID NO: 71965 - DNA, 40 bp, Homo sapiens
ttttgtatccttactacaagttctttttttatttttttgt

SEQ ID NO: 71966 - DNA, 40 bp, Homo sapiens
caaaaaaataaaaaaagaacttgtagtaaggatacaaaat

SEQ ID NO: 71967 - DNA, 40 bp, Homo sapiens
attttgtatccttactacaagttctttttttatttttttg

SEQ ID NO: 71968 - DNA, 40 bp, Homo sapiens
aaaaaaataaaaaaagaacttgtagtaaggatacaaaatg

SEQ ID NO: 71969 - DNA, 40 bp, Homo sapiens
cattttgtatccttactacaagttctttttttattttttt

SEQ ID NO: 71970 - DNA, 40 bp, Homo sapiens
aaaaaataaaaaaagaacttgtagtaaggatacaaaatgc

SEQ ID NO: 71971 - DNA, 40 bp, Homo sapiens
gcattttgtatccttactacaagttctttttttatttttt

SEQ ID NO: 71972 - DNA, 40 bp, Homo sapiens
aaaaataaaaaaagaacttgtagtaaggatacaaaatgct

SEQ ID NO: 71973 - DNA, 40 bp, Homo sapiens
agcattttgtatccttactacaagttctttttttattttt

SEQ ID NO: 71974 - DNA, 40 bp, Homo sapiens
aaaataaaaaaagaacttgtagtaaggatacaaaatgctc

SEQ ID NO: 71975 - DNA, 40 bp, Homo sapiens
gagcattttgtatccttactacaagttctttttttatttt

SEQ ID NO: 71976 - DNA, 40 bp, Homo sapiens
aaataaaaaaagaacttgtagtaaggatacaaaatgctcc

SEQ ID NO: 71977 - DNA, 40 bp, Homo sapiens
ggagcattttgtatccttactacaagttctttttttattt

SEQ ID NO: 71978 - DNA, 40 bp, Homo sapiens
aataaaaaaagaacttgtagtaaggatacaaaatgctcct

SEQ ID NO: 71979 - DNA, 40 bp, Homo sapiens
aggagcattttgtatccttactacaagttctttttttatt

SEQ ID NO: 71980 - DNA, 40 bp, Homo sapiens
ataaaaaaagaacttgtagtaaggatacaaaatgctccta

SEQ ID NO: 71981 - DNA, 40 bp, Homo sapiens
taggagcattttgtatccttactacaagttctttttttat

SEQ ID NO: 71982 - DNA, 40 bp, Homo sapiens
taaaaaaagaacttgtagtaaggatacaaaatgctcctat

SEQ ID NO: 71983 - DNA, 40 bp, Homo sapiens
ataggagcattttgtatccttactacaagttcttttttta

SEQ ID NO: 71984 - DNA, 40 bp, Homo sapiens
aaaaaaagaacttgtagtaaggatacaaaatgctcctatt

SEQ ID NO: 71985 - DNA, 40 bp, Homo sapiens
aataggagcattttgtatccttactacaagttcttttttt

SEQ ID NO: 71986 - DNA, 40 bp, Homo sapiens
aaaaaagaacttgtagtaaggatacaaaatgctcctattt

SEQ ID NO: 71987 - DNA, 40 bp, Homo sapiens
aaataggagcattttgtatccttactacaagttctttttt

SEQ ID NO: 71988 - DNA, 40 bp, Homo sapiens
aaaaagaacttgtagtaaggatacaaaatgctcctatttt

SEQ ID NO: 71989 - DNA, 40 bp, Homo sapiens
aaaataggagcattttgtatccttactacaagttcttttt

SEQ ID NO: 71990 - DNA, 40 bp, Homo sapiens
aaaagaacttgtagtaaggatacaaaatgctcctattttg

SEQ ID NO: 71991 - DNA, 40 bp, Homo sapiens
caaaataggagcattttgtatccttactacaagttctttt

SEQ ID NO: 71992 - DNA, 40 bp, Homo sapiens
aaagaacttgtagtaaggatacaaaatgctcctattttgt

SEQ ID NO: 71993 - DNA, 40 bp, Homo sapiens
acaaaataggagcattttgtatccttactacaagttcttt

SEQ ID NO: 71994 - DNA, 40 bp, Homo sapiens
aagaacttgtagtaaggatacaaaatgctcctattttgtg

SEQ ID NO: 71995 - DNA, 40 bp, Homo sapiens
cacaaaataggagcattttgtatccttactacaagttctt

SEQ ID NO: 71996 - DNA, 40 bp, Homo sapiens
agaacttgtagtaaggatacaaaatgctcctattttgtgt

SEQ ID NO: 71997 - DNA, 40 bp, Homo sapiens
acacaaaataggagcattttgtatccttactacaagttct

SEQ ID NO: 71998 - DNA, 40 bp, Homo sapiens
gaacttgtagtaaggatacaaaatgctcctattttgtgtg

SEQ ID NO: 71999 - DNA, 40 bp, Homo sapiens
cacacaaaataggagcattttgtatccttactacaagttc

SEQ ID NO: 72000 - DNA, 40 bp, Homo sapiens
aacttgtagtaaggatacaaaatgctcctattttgtgtgt

SEQ ID NO: 72001 - DNA, 40 bp, Homo sapiens
acacacaaaataggagcattttgtatccttactacaagtt

SEQ ID NO: 72002 - DNA, 40 bp, Homo sapiens
acttgtagtaaggatacaaaatgctcctattttgtgtgtg

SEQ ID NO: 72003 - DNA, 40 bp, Homo sapiens
cacacacaaaataggagcattttgtatccttactacaagt

SEQ ID NO: 72004 - DNA, 40 bp, Homo sapiens
cttgtagtaaggatacaaaatgctcctattttgtgtgtgt

SEQ ID NO: 72005 - DNA, 40 bp, Homo sapiens
acacacacaaaataggagcattttgtatccttactacaag

SEQ ID NO: 72006 - DNA, 40 bp, Homo sapiens
ttgtagtaaggatacaaaatgctcctattttgtgtgtgtc

SEQ ID NO: 72007 - DNA, 40 bp, Homo sapiens
gacacacacaaaataggagcattttgtatccttactacaa

SEQ ID NO: 72008 - DNA, 40 bp, Homo sapiens
tgtagtaaggatacaaaatgctcctattttgtgtgtgtcc

SEQ ID NO: 72009 - DNA, 40 bp, Homo sapiens
ggacacacacaaaataggagcattttgtatccttactaca

SEQ ID NO: 72010 - DNA, 40 bp, Homo sapiens
gtagtaaggatacaaaatgctcctattttgtgtgtgtcct

SEQ ID NO: 72011 - DNA, 40 bp, Homo sapiens
aggacacacacaaaataggagcattttgtatccttactac

SEQ ID NO: 72012 - DNA, 40 bp, Homo sapiens
tagtaaggatacaaaatgctcctattttgtgtgtgtcctt

SEQ ID NO: 72013 - DNA, 40 bp, Homo sapiens
aaggacacacacaaaataggagcattttgtatccttacta

SEQ ID NO: 72014 - DNA, 40 bp, Homo sapiens
agtaaggatacaaaatgctcctattttgtgtgtgtccttt

SEQ ID NO: 72015 - DNA, 40 bp, Homo sapiens
aaaggacacacacaaaataggagcattttgtatccttact

SEQ ID NO: 72016 - DNA, 40 bp, Homo sapiens
gtaaggatacaaaatgctcctattttgtgtgtgtccttta

SEQ ID NO: 72017 - DNA, 40 bp, Homo sapiens
taaaggacacacacaaaataggagcattttgtatccttac

SEQ ID NO: 72018 - DNA, 40 bp, Homo sapiens
taaggatacaaaatgctcctattttgtgtgtgtcctttaa

SEQ ID NO: 72019 - DNA, 40 bp, Homo sapiens
ttaaaggacacacacaaaataggagcattttgtatcctta

SEQ ID NO: 72020 - DNA, 40 bp, Homo sapiens
aaggatacaaaatgctcctattttgtgtgtgtcctttaat

SEQ ID NO: 72021 - DNA, 40 bp, Homo sapiens
attaaaggacacacacaaaataggagcattttgtatcctt

SEQ ID NO: 72022 - DNA, 40 bp, Homo sapiens
aggatacaaaatgctcctattttgtgtgtgtcctttaatt

SEQ ID NO: 72023 - DNA, 40 bp, Homo sapiens
aattaaaggacacacacaaaataggagcattttgtatcct

SEQ ID NO: 72024 - DNA, 40 bp, Homo sapiens
ggatacaaaatgctcctattttgtgtgtgtcctttaattc

SEQ ID NO: 72025 - DNA, 40 bp, Homo sapiens
gaattaaaggacacacacaaaataggagcattttgtatcc

SEQ ID NO: 72026 - DNA, 40 bp, Homo sapiens
gatacaaaatgctcctattttgtgtgtgtcctttaattca

SEQ ID NO: 72027 - DNA, 40 bp, Homo sapiens
tgaattaaaggacacacacaaaataggagcattttgtatc

SEQ ID NO: 72028 - DNA, 40 bp, Homo sapiens
atacaaaatgctcctattttgtgtgtgtcctttaattcat

SEQ ID NO: 72029 - DNA, 40 bp, Homo sapiens
atgaattaaaggacacacacaaaataggagcattttgtat

SEQ ID NO: 72030 - DNA, 40 bp, Homo sapiens
tacaaaatgctcctattttgtgtgtgtcctttaattcatg

SEQ ID NO: 72031 - DNA, 40 bp, Homo sapiens
catgaattaaaggacacacacaaaataggagcattttgta

SEQ ID NO: 72032 - DNA, 40 bp, Homo sapiens
acaaaatgctcctattttgtgtgtgtcctttaattcatga

SEQ ID NO: 72033 - DNA, 40 bp, Homo sapiens
tcatgaattaaaggacacacacaaaataggagcattttgt

SEQ ID NO: 72034 - DNA, 40 bp, Homo sapiens
caaaatgctcctattttgtgtgtgtcctttaattcatgat

SEQ ID NO: 72035 - DNA, 40 bp, Homo sapiens
atcatgaattaaaggacacacacaaaataggagcattttg

SEQ ID NO: 72036 - DNA, 40 bp, Homo sapiens
aaaatgctcctattttgtgtgtgtcctttaattcatgatg

SEQ ID NO: 72037 - DNA, 40 bp, Homo sapiens
catcatgaattaaaggacacacacaaaataggagcatttt

SEQ ID NO: 72038 - DNA, 40 bp, Homo sapiens
aaatgctcctattttgtgtgtgtcctttaattcatgatgt

SEQ ID NO: 72039 - DNA, 40 bp, Homo sapiens
acatcatgaattaaaggacacacacaaaataggagcattt

SEQ ID NO: 72040 - DNA, 40 bp, Homo sapiens
aatgctcctattttgtgtgtgtcctttaattcatgatgtt

SEQ ID NO: 72041 - DNA, 40 bp, Homo sapiens
aacatcatgaattaaaggacacacacaaaataggagcatt

SEQ ID NO: 72042 - DNA, 40 bp, Homo sapiens
atgctcctattttgtgtgtgtcctttaattcatgatgttt

SEQ ID NO: 72043 - DNA, 40 bp, Homo sapiens
aaacatcatgaattaaaggacacacacaaaataggagcat

SEQ ID NO: 72044 - DNA, 40 bp, Homo sapiens
tgctcctattttgtgtgtgtcctttaattcatgatgtttt

SEQ ID NO: 72045 - DNA, 40 bp, Homo sapiens
aaaacatcatgaattaaaggacacacacaaaataggagca

SEQ ID NO: 72046 - DNA, 40 bp, Homo sapiens
gctcctattttgtgtgtgtcctttaattcatgatgttttt

SEQ ID NO: 72047 - DNA, 40 bp, Homo sapiens
aaaaacatcatgaattaaaggacacacacaaaataggagc

SEQ ID NO: 72048 - DNA, 40 bp, Homo sapiens
ctcctattttgtgtgtgtcctttaattcatgatgttttta

SEQ ID NO: 72049 - DNA, 40 bp, Homo sapiens
taaaaacatcatgaattaaaggacacacacaaaataggag

SEQ ID NO: 72050 - DNA, 40 bp, Homo sapiens
tcctattttgtgtgtgtcctttaattcatgatgtttttat

SEQ ID NO: 72051 - DNA, 40 bp, Homo sapiens
ataaaaacatcatgaattaaaggacacacacaaaatagga

SEQ ID NO: 72052 - DNA, 40 bp, Homo sapiens
cctattttgtgtgtgtcctttaattcatgatgtttttata

SEQ ID NO: 72053 - DNA, 40 bp, Homo sapiens
tataaaaacatcatgaattaaaggacacacacaaaatagg

SEQ ID NO: 72054 - DNA, 40 bp, Homo sapiens
ctattttgtgtgtgtcctttaattcatgatgtttttatat

SEQ ID NO: 72055 - DNA, 40 bp, Homo sapiens
atataaaaacatcatgaattaaaggacacacacaaaatag

SEQ ID NO: 72056 - DNA, 40 bp, Homo sapiens
tattttgtgtgtgtcctttaattcatgatgtttttatatt

SEQ ID NO: 72057 - DNA, 40 bp, Homo sapiens
aatataaaaacatcatgaattaaaggacacacacaaaata

SEQ ID NO: 72058 - DNA, 40 bp, Homo sapiens
attttgtgtgtgtcctttaattcatgatgtttttatatta

SEQ ID NO: 72059 - DNA, 40 bp, Homo sapiens
taatataaaaacatcatgaattaaaggacacacacaaaat

SEQ ID NO: 72060 - DNA, 40 bp, Homo sapiens
ttttgtgtgtgtcctttaattcatgatgtttttatattat

SEQ ID NO: 72061 - DNA, 40 bp, Homo sapiens
ataatataaaaacatcatgaattaaaggacacacacaaaa

SEQ ID NO: 72062 - DNA, 40 bp, Homo sapiens
tttgtgtgtgtcctttaattcatgatgtttttatattatg

SEQ ID NO: 72063 - DNA, 40 bp, Homo sapiens
cataatataaaaacatcatgaattaaaggacacacacaaa

SEQ ID NO: 72064 - DNA, 40 bp, Homo sapiens
ttgtgtgtgtcctttaattcatgatgtttttatattatgg

SEQ ID NO: 72065 - DNA, 40 bp, Homo sapiens
ccataatataaaaacatcatgaattaaaggacacacacaa

SEQ ID NO: 72066 - DNA, 40 bp, Homo sapiens
tgtgtgtgtcctttaattcatgatgtttttatattatggt

SEQ ID NO: 72067 - DNA, 40 bp, Homo sapiens
accataatataaaaacatcatgaattaaaggacacacaca

SEQ ID NO: 72068 - DNA, 40 bp, Homo sapiens
gtgtgtgtcctttaattcatgatgtttttatattatggta

SEQ ID NO: 72069 - DNA, 40 bp, Homo sapiens
taccataatataaaaacatcatgaattaaaggacacacac

SEQ ID NO: 72070 - DNA, 40 bp, Homo sapiens
tgtgtgtcctttaattcatgatgtttttatattatggtaa

SEQ ID NO: 72071 - DNA, 40 bp, Homo sapiens
ttaccataatataaaaacatcatgaattaaaggacacaca

SEQ ID NO: 72072 - DNA, 40 bp, Homo sapiens
gtgtgtcctttaattcatgatgtttttatattatggtaag

SEQ ID NO: 72073 - DNA, 40 bp, Homo sapiens
cttaccataatataaaaacatcatgaattaaaggacacac

SEQ ID NO: 72074 - DNA, 40 bp, Homo sapiens
tgtgtcctttaattcatgatgtttttatattatggtaagc

SEQ ID NO: 72075 - DNA, 40 bp, Homo sapiens
gcttaccataatataaaaacatcatgaattaaaggacaca

SEQ ID NO: 72076 - DNA, 40 bp, Homo sapiens
gtgtcctttaattcatgatgtttttatattatggtaagca

SEQ ID NO: 72077 - DNA, 40 bp, Homo sapiens
tgcttaccataatataaaaacatcatgaattaaaggacac

SEQ ID NO: 72078 - DNA, 40 bp, Homo sapiens
tgtcctttaattcatgatgtttttatattatggtaagcag

SEQ ID NO: 72079 - DNA, 40 bp, Homo sapiens
ctgcttaccataatataaaaacatcatgaattaaaggaca

SEQ ID NO: 72080 - DNA, 40 bp, Homo sapiens
gtcctttaattcatgatgtttttatattatggtaagcagc

SEQ ID NO: 72081 - DNA, 40 bp, Homo sapiens
gctgcttaccataatataaaaacatcatgaattaaaggac

SEQ ID NO: 72082 - DNA, 40 bp, Homo sapiens
tcctttaattcatgatgtttttatattatggtaagcagct

SEQ ID NO: 72083 - DNA, 40 bp, Homo sapiens
agctgcttaccataatataaaaacatcatgaattaaagga

SEQ ID NO: 72084 - DNA, 40 bp, Homo sapiens
cctttaattcatgatgtttttatattatggtaagcagctc

SEQ ID NO: 72085 - DNA, 40 bp, Homo sapiens
gagctgcttaccataatataaaaacatcatgaattaaagg

SEQ ID NO: 72086 - DNA, 40 bp, Homo sapiens
ctttaattcatgatgtttttatattatggtaagcagctct

SEQ ID NO: 72087 - DNA, 40 bp, Homo sapiens
agagctgcttaccataatataaaaacatcatgaattaaag

SEQ ID NO: 72088 - DNA, 40 bp, Homo sapiens
tttaattcatgatgtttttatattatggtaagcagctctc

SEQ ID NO: 72089 - DNA, 40 bp, Homo sapiens
gagagctgcttaccataatataaaaacatcatgaattaaa

SEQ ID NO: 72090 - DNA, 40 bp, Homo sapiens
ttaattcatgatgtttttatattatggtaagcagctctca

SEQ ID NO: 72091 - DNA, 40 bp, Homo sapiens
tgagagctgcttaccataatataaaaacatcatgaattaa

SEQ ID NO: 72092 - DNA, 40 bp, Homo sapiens
taattcatgatgtttttatattatggtaagcagctctcat

SEQ ID NO: 72093 - DNA, 40 bp, Homo sapiens
atgagagctgcttaccataatataaaaacatcatgaatta

SEQ ID NO: 72094 - DNA, 40 bp, Homo sapiens
aattcatgatgtttttatattatggtaagcagctctcatt

SEQ ID NO: 72095 - DNA, 40 bp, Homo sapiens
aatgagagctgcttaccataatataaaaacatcatgaatt

SEQ ID NO: 72096 - DNA, 40 bp, Homo sapiens
attcatgatgtttttatattatggtaagcagctctcattt

SEQ ID NO: 72097 - DNA, 40 bp, Homo sapiens
aaatgagagctgcttaccataatataaaaacatcatgaat

SEQ ID NO: 72098 - DNA, 40 bp, Homo sapiens
ttcatgatgtttttatattatggtaagcagctctcattta

SEQ ID NO: 72099 - DNA, 40 bp, Homo sapiens
taaatgagagctgcttaccataatataaaaacatcatgaa

SEQ ID NO: 72100 - DNA, 40 bp, Homo sapiens
tcatgatgtttttatattatggtaagcagctctcatttaa

SEQ ID NO: 72101 - DNA, 40 bp, Homo sapiens
ttaaatgagagctgcttaccataatataaaaacatcatga

SEQ ID NO: 72102 - DNA, 40 bp, Homo sapiens
catgatgtttttatattatggtaagcagctctcatttaag

SEQ ID NO: 72103 - DNA, 40 bp, Homo sapiens
cttaaatgagagctgcttaccataatataaaaacatcatg

SEQ ID NO: 72104 - DNA, 40 bp, Homo sapiens
atgatgtttttatattatggtaagcagctctcatttaaga

SEQ ID NO: 72105 - DNA, 40 bp, Homo sapiens
tcttaaatgagagctgcttaccataatataaaaacatcat

SEQ ID NO: 72106 - DNA, 40 bp, Homo sapiens
tgatgtttttatattatggtaagcagctctcatttaagat

SEQ ID NO: 72107 - DNA, 40 bp, Homo sapiens
atcttaaatgagagctgcttaccataatataaaaacatca

SEQ ID NO: 72108 - DNA, 40 bp, Homo sapiens
gatgtttttatattatggtaagcagctctcatttaagatt

SEQ ID NO: 72109 - DNA, 40 bp, Homo sapiens
aatcttaaatgagagctgcttaccataatataaaaacatc

SEQ ID NO: 72110 - DNA, 40 bp, Homo sapiens
atgtttttatattatggtaagcagctctcatttaagattt

SEQ ID NO: 72111 - DNA, 40 bp, Homo sapiens
aaatcttaaatgagagctgcttaccataatataaaaacat

SEQ ID NO: 72112 - DNA, 40 bp, Homo sapiens
tgtttttatattatggtaagcagctctcatttaagatttt

SEQ ID NO: 72113 - DNA, 40 bp, Homo sapiens
aaaatcttaaatgagagctgcttaccataatataaaaaca

SEQ ID NO: 72114 - DNA, 40 bp, Homo sapiens
gtttttatattatggtaagcagctctcatttaagatttta

SEQ ID NO: 72115 - DNA, 40 bp, Homo sapiens
taaaatcttaaatgagagctgcttaccataatataaaaac

SEQ ID NO: 72116 - DNA, 40 bp, Homo sapiens
tttttatattatggtaagcagctctcatttaagattttaa

SEQ ID NO: 72117 - DNA, 40 bp, Homo sapiens
ttaaaatcttaaatgagagctgcttaccataatataaaaa

SEQ ID NO: 72118 - DNA, 40 bp, Homo sapiens
ttttatattatggtaagcagctctcatttaagattttaat

SEQ ID NO: 72119 - DNA, 40 bp, Homo sapiens
attaaaatcttaaatgagagctgcttaccataatataaaa

SEQ ID NO: 72120 - DNA, 40 bp, Homo sapiens
tttatattatggtaagcagctctcatttaagattttaata

SEQ ID NO: 72121 - DNA, 40 bp, Homo sapiens
tattaaaatcttaaatgagagctgcttaccataatataaa

SEQ ID NO: 72122 - DNA, 40 bp, Homo sapiens
ttatattatggtaagcagctctcatttaagattttaataa

SEQ ID NO: 72123 - DNA, 40 bp, Homo sapiens
ttattaaaatcttaaatgagagctgcttaccataatataa

SEQ ID NO: 72124 - DNA, 40 bp, Homo sapiens
tatattatggtaagcagctctcatttaagattttaataat

SEQ ID NO: 72125 - DNA, 40 bp, Homo sapiens
attattaaaatcttaaatgagagctgcttaccataatata

SEQ ID NO: 72126 - DNA, 40 bp, Homo sapiens
atattatggtaagcagctctcatttaagattttaataatg

SEQ ID NO: 72127 - DNA, 40 bp, Homo sapiens
cattattaaaatcttaaatgagagctgcttaccataatat

SEQ ID NO: 72128 - DNA, 40 bp, Homo sapiens
tattatggtaagcagctctcatttaagattttaataatgt

SEQ ID NO: 72129 - DNA, 40 bp, Homo sapiens
acattattaaaatcttaaatgagagctgcttaccataata

SEQ ID NO: 72130 - DNA, 40 bp, Homo sapiens
attatggtaagcagctctcatttaagattttaataatgta

SEQ ID NO: 72131 - DNA, 40 bp, Homo sapiens
tacattattaaaatcttaaatgagagctgcttaccataat

SEQ ID NO: 72132 - DNA, 40 bp, Homo sapiens
ttatggtaagcagctctcatttaagattttaataatgtaa

SEQ ID NO: 72133 - DNA, 40 bp, Homo sapiens
ttacattattaaaatcttaaatgagagctgcttaccataa

SEQ ID NO: 72134 - DNA, 40 bp, Homo sapiens
tatggtaagcagctctcatttaagattttaataatgtaat

SEQ ID NO: 72135 - DNA, 40 bp, Homo sapiens
attacattattaaaatcttaaatgagagctgcttaccata

SEQ ID NO: 72136 - DNA, 40 bp, Homo sapiens
atggtaagcagctctcatttaagattttaataatgtaatt

SEQ ID NO: 72137 - DNA, 40 bp, Homo sapiens
aattacattattaaaatcttaaatgagagctgcttaccat

SEQ ID NO: 72138 - DNA, 40 bp, Homo sapiens
tggtaagcagctctcatttaagattttaataatgtaatta

SEQ ID NO: 72139 - DNA, 40 bp, Homo sapiens
taattacattattaaaatcttaaatgagagctgcttacca

SEQ ID NO: 72140 - DNA, 40 bp, Homo sapiens
ggtaagcagctctcatttaagattttaataatgtaattaa

SEQ ID NO: 72141 - DNA, 40 bp, Homo sapiens
ttaattacattattaaaatcttaaatgagagctgcttacc

SEQ ID NO: 72142 - DNA, 40 bp, Homo sapiens
gtaagcagctctcatttaagattttaataatgtaattaaa

SEQ ID NO: 72143 - DNA, 40 bp, Homo sapiens
tttaattacattattaaaatcttaaatgagagctgcttac

SEQ ID NO: 72144 - DNA, 40 bp, Homo sapiens
taagcagctctcatttaagattttaataatgtaattaaac

SEQ ID NO: 72145 - DNA, 40 bp, Homo sapiens
gtttaattacattattaaaatcttaaatgagagctgctta

SEQ ID NO: 72146 - DNA, 40 bp, Homo sapiens
aagcagctctcatttaagattttaataatgtaattaaaca

SEQ ID NO: 72147 - DNA, 40 bp, Homo sapiens
tgtttaattacattattaaaatcttaaatgagagctgctt

SEQ ID NO: 72148 - DNA, 40 bp, Homo sapiens
agcagctctcatttaagattttaataatgtaattaaacat

SEQ ID NO: 72149 - DNA, 40 bp, Homo sapiens
atgtttaattacattattaaaatcttaaatgagagctgct

SEQ ID NO: 72150 - DNA, 40 bp, Homo sapiens
gcagctctcatttaagattttaataatgtaattaaacatg

SEQ ID NO: 72151 - DNA, 40 bp, Homo sapiens
catgtttaattacattattaaaatcttaaatgagagctgc

SEQ ID NO: 72152 - DNA, 40 bp, Homo sapiens
cagctctcatttaagattttaataatgtaattaaacatgt

SEQ ID NO: 72153 - DNA, 40 bp, Homo sapiens
acatgtttaattacattattaaaatcttaaatgagagctg

SEQ ID NO: 72154 - DNA, 40 bp, Homo sapiens
agctctcatttaagattttaataatgtaattaaacatgta

SEQ ID NO: 72155 - DNA, 40 bp, Homo sapiens
tacatgtttaattacattattaaaatcttaaatgagagct

SEQ ID NO: 72156 - DNA, 40 bp, Homo sapiens
gctctcatttaagattttaataatgtaattaaacatgtac

SEQ ID NO: 72157 - DNA, 40 bp, Homo sapiens
gtacatgtttaattacattattaaaatcttaaatgagagc

SEQ ID NO: 72158 - DNA, 40 bp, Homo sapiens
ctctcatttaagattttaataatgtaattaaacatgtaca

SEQ ID NO: 72159 - DNA, 40 bp, Homo sapiens
tgtacatgtttaattacattattaaaatcttaaatgagag

SEQ ID NO: 72160 - DNA, 40 bp, Homo sapiens
tctcatttaagattttaataatgtaattaaacatgtacag

SEQ ID NO: 72161 - DNA, 40 bp, Homo sapiens
ctgtacatgtttaattacattattaaaatcttaaatgaga

SEQ ID NO: 72162 - DNA, 40 bp, Homo sapiens
ctcatttaagattttaataatgtaattaaacatgtacaga

SEQ ID NO: 72163 - DNA, 40 bp, Homo sapiens
tctgtacatgtttaattacattattaaaatcttaaatgag

SEQ ID NO: 72164 - DNA, 40 bp, Homo sapiens
tcatttaagattttaataatgtaattaaacatgtacagaa

SEQ ID NO: 72165 - DNA, 40 bp, Homo sapiens
ttctgtacatgtttaattacattattaaaatcttaaatga

SEQ ID NO: 72166 - DNA, 40 bp, Homo sapiens
catttaagattttaataatgtaattaaacatgtacagaag

SEQ ID NO: 72167 - DNA, 40 bp, Homo sapiens
cttctgtacatgtttaattacattattaaaatcttaaatg

SEQ ID NO: 72168 - DNA, 40 bp, Homo sapiens
atttaagattttaataatgtaattaaacatgtacagaaga

SEQ ID NO: 72169 - DNA, 40 bp, Homo sapiens
tcttctgtacatgtttaattacattattaaaatcttaaat

SEQ ID NO: 72170 - DNA, 40 bp, Homo sapiens
tttaagattttaataatgtaattaaacatgtacagaagac

SEQ ID NO: 72171 - DNA, 40 bp, Homo sapiens
gtcttctgtacatgtttaattacattattaaaatcttaaa

SEQ ID NO: 72172 - DNA, 40 bp, Homo sapiens
ttaagattttaataatgtaattaaacatgtacagaagacc

SEQ ID NO: 72173 - DNA, 40 bp, Homo sapiens
ggtcttctgtacatgtttaattacattattaaaatcttaa

SEQ ID NO: 72174 - DNA, 40 bp, Homo sapiens
taagattttaataatgtaattaaacatgtacagaagaccc

SEQ ID NO: 72175 - DNA, 40 bp, Homo sapiens
gggtcttctgtacatgtttaattacattattaaaatctta

SEQ ID NO: 72176 - DNA, 40 bp, Homo sapiens
aagattttaataatgtaattaaacatgtacagaagaccca

SEQ ID NO: 72177 - DNA, 40 bp, Homo sapiens
tgggtcttctgtacatgtttaattacattattaaaatctt

SEQ ID NO: 72178 - DNA, 40 bp, Homo sapiens
agattttaataatgtaattaaacatgtacagaagacccag

SEQ ID NO: 72179 - DNA, 40 bp, Homo sapiens
ctgggtcttctgtacatgtttaattacattattaaaatct

SEQ ID NO: 72180 - DNA, 40 bp, Homo sapiens
gattttaataatgtaattaaacatgtacagaagacccagt

SEQ ID NO: 72181 - DNA, 40 bp, Homo sapiens
actgggtcttctgtacatgtttaattacattattaaaatc

SEQ ID NO: 72182 - DNA, 40 bp, Homo sapiens
attttaataatgtaattaaacatgtacagaagacccagtc

SEQ ID NO: 72183 - DNA, 40 bp, Homo sapiens
gactgggtcttctgtacatgtttaattacattattaaaat

SEQ ID NO: 72184 - DNA, 40 bp, Homo sapiens
ttttaataatgtaattaaacatgtacagaagacccagtct

SEQ ID NO: 72185 - DNA, 40 bp, Homo sapiens
agactgggtcttctgtacatgtttaattacattattaaaa

SEQ ID NO: 72186 - DNA, 40 bp, Homo sapiens
tttaataatgtaattaaacatgtacagaagacccagtctc

SEQ ID NO: 72187 - DNA, 40 bp, Homo sapiens
gagactgggtcttctgtacatgtttaattacattattaaa

SEQ ID NO: 72188 - DNA, 40 bp, Homo sapiens
ttaataatgtaattaaacatgtacagaagacccagtctca

SEQ ID NO: 72189 - DNA, 40 bp, Homo sapiens
tgagactgggtcttctgtacatgtttaattacattattaa

SEQ ID NO: 72190 - DNA, 40 bp, Homo sapiens
taataatgtaattaaacatgtacagaagacccagtctcag

SEQ ID NO: 72191 - DNA, 40 bp, Homo sapiens
ctgagactgggtcttctgtacatgtttaattacattatta

SEQ ID NO: 72192 - DNA, 40 bp, Homo sapiens
aataatgtaattaaacatgtacagaagacccagtctcagc

SEQ ID NO: 72193 - DNA, 40 bp, Homo sapiens
gctgagactgggtcttctgtacatgtttaattacattatt

SEQ ID NO: 72194 - DNA, 40 bp, Homo sapiens
ataatgtaattaaacatgtacagaagacccagtctcagct

SEQ ID NO: 72195 - DNA, 40 bp, Homo sapiens
agctgagactgggtcttctgtacatgtttaattacattat

SEQ ID NO: 72196 - DNA, 40 bp, Homo sapiens
taatgtaattaaacatgtacagaagacccagtctcagctt

SEQ ID NO: 72197 - DNA, 40 bp, Homo sapiens
aagctgagactgggtcttctgtacatgtttaattacatta

SEQ ID NO: 72198 - DNA, 40 bp, Homo sapiens
aatgtaattaaacatgtacagaagacccagtctcagcttc

SEQ ID NO: 72199 - DNA, 40 bp, Homo sapiens
gaagctgagactgggtcttctgtacatgtttaattacatt

SEQ ID NO: 72200 - DNA, 40 bp, Homo sapiens
atgtaattaaacatgtacagaagacccagtctcagcttca

SEQ ID NO: 72201 - DNA, 40 bp, Homo sapiens
tgaagctgagactgggtcttctgtacatgtttaattacat

SEQ ID NO: 72202 - DNA, 40 bp, Homo sapiens
tgtaattaaacatgtacagaagacccagtctcagcttcac

SEQ ID NO: 72203 - DNA, 40 bp, Homo sapiens
gtgaagctgagactgggtcttctgtacatgtttaattaca

SEQ ID NO: 72204 - DNA, 40 bp, Homo sapiens
gtaattaaacatgtacagaagacccagtctcagcttcact

SEQ ID NO: 72205 - DNA, 40 bp, Homo sapiens
agtgaagctgagactgggtcttctgtacatgtttaattac

SEQ ID NO: 72206 - DNA, 40 bp, Homo sapiens
taattaaacatgtacagaagacccagtctcagcttcactt

SEQ ID NO: 72207 - DNA, 40 bp, Homo sapiens
aagtgaagctgagactgggtcttctgtacatgtttaatta

SEQ ID NO: 72208 - DNA, 40 bp, Homo sapiens
aattaaacatgtacagaagacccagtctcagcttcacttg

SEQ ID NO: 72209 - DNA, 40 bp, Homo sapiens
caagtgaagctgagactgggtcttctgtacatgtttaatt

SEQ ID NO: 72210 - DNA, 40 bp, Homo sapiens
attaaacatgtacagaagacccagtctcagcttcacttgt

SEQ ID NO: 72211 - DNA, 40 bp, Homo sapiens
acaagtgaagctgagactgggtcttctgtacatgtttaat

SEQ ID NO: 72212 - DNA, 40 bp, Homo sapiens
ttaaacatgtacagaagacccagtctcagcttcacttgta

SEQ ID NO: 72213 - DNA, 40 bp, Homo sapiens
tacaagtgaagctgagactgggtcttctgtacatgtttaa

SEQ ID NO: 72214 - DNA, 40 bp, Homo sapiens
taaacatgtacagaagacccagtctcagcttcacttgtat

SEQ ID NO: 72215 - DNA, 40 bp, Homo sapiens
atacaagtgaagctgagactgggtcttctgtacatgttta

SEQ ID NO: 72216 - DNA, 40 bp, Homo sapiens
aaacatgtacagaagacccagtctcagcttcacttgtata

SEQ ID NO: 72217 - DNA, 40 bp, Homo sapiens
tatacaagtgaagctgagactgggtcttctgtacatgttt

SEQ ID NO: 72218 - DNA, 40 bp, Homo sapiens
aacatgtacagaagacccagtctcagcttcacttgtatac

SEQ ID NO: 72219 - DNA, 40 bp, Homo sapiens
gtatacaagtgaagctgagactgggtcttctgtacatgtt

SEQ ID NO: 72220 - DNA, 40 bp, Homo sapiens
acatgtacagaagacccagtctcagcttcacttgtatacc

SEQ ID NO: 72221 - DNA, 40 bp, Homo sapiens
ggtatacaagtgaagctgagactgggtcttctgtacatgt

SEQ ID NO: 72222 - DNA, 40 bp, Homo sapiens
catgtacagaagacccagtctcagcttcacttgtataccc

SEQ ID NO: 72223 - DNA, 40 bp, Homo sapiens
gggtatacaagtgaagctgagactgggtcttctgtacatg

SEQ ID NO: 72224 - DNA, 40 bp, Homo sapiens
atgtacagaagacccagtctcagcttcacttgtataccct

SEQ ID NO: 72225 - DNA, 40 bp, Homo sapiens
agggtatacaagtgaagctgagactgggtcttctgtacat

SEQ ID NO: 72226 - DNA, 40 bp, Homo sapiens
tgtacagaagacccagtctcagcttcacttgtataccctg

SEQ ID NO: 72227 - DNA, 40 bp, Homo sapiens
cagggtatacaagtgaagctgagactgggtcttctgtaca

SEQ ID NO: 72228 - DNA, 40 bp, Homo sapiens
gtacagaagacccagtctcagcttcacttgtataccctgg

SEQ ID NO: 72229 - DNA, 40 bp, Homo sapiens
ccagggtatacaagtgaagctgagactgggtcttctgtac

SEQ ID NO: 72230 - DNA, 40 bp, Homo sapiens
tacagaagacccagtctcagcttcacttgtataccctgga

SEQ ID NO: 72231 - DNA, 40 bp, Homo sapiens
tccagggtatacaagtgaagctgagactgggtcttctgta

SEQ ID NO: 72232 - DNA, 40 bp, Homo sapiens
acagaagacccagtctcagcttcacttgtataccctggaa

SEQ ID NO: 72233 - DNA, 40 bp, Homo sapiens
ttccagggtatacaagtgaagctgagactgggtcttctgt

SEQ ID NO: 72234 - DNA, 40 bp, Homo sapiens
cagaagacccagtctcagcttcacttgtataccctggaaa

SEQ ID NO: 72235 - DNA, 40 bp, Homo sapiens
tttccagggtatacaagtgaagctgagactgggtcttctg

SEQ ID NO: 72236 - DNA, 40 bp, Homo sapiens
agaagacccagtctcagcttcacttgtataccctggaaat

SEQ ID NO: 72237 - DNA, 40 bp, Homo sapiens
atttccagggtatacaagtgaagctgagactgggtcttct

SEQ ID NO: 72238 - DNA, 40 bp, Homo sapiens
gaagacccagtctcagcttcacttgtataccctggaaata

SEQ ID NO: 72239 - DNA, 40 bp, Homo sapiens
tatttccagggtatacaagtgaagctgagactgggtcttc

SEQ ID NO: 72240 - DNA, 40 bp, Homo sapiens
aagacccagtctcagcttcacttgtataccctggaaatag

SEQ ID NO: 72241 - DNA, 40 bp, Homo sapiens
ctatttccagggtatacaagtgaagctgagactgggtctt

SEQ ID NO: 72242 - DNA, 40 bp, Homo sapiens
agacccagtctcagcttcacttgtataccctggaaataga

SEQ ID NO: 72243 - DNA, 40 bp, Homo sapiens
tctatttccagggtatacaagtgaagctgagactgggtct

SEQ ID NO: 72244 - DNA, 40 bp, Homo sapiens
gacccagtctcagcttcacttgtataccctggaaatagac

SEQ ID NO: 72245 - DNA, 40 bp, Homo sapiens
gtctatttccagggtatacaagtgaagctgagactgggtc

SEQ ID NO: 72246 - DNA, 40 bp, Homo sapiens
acccagtctcagcttcacttgtataccctggaaatagact

SEQ ID NO: 72247 - DNA, 40 bp, Homo sapiens
agtctatttccagggtatacaagtgaagctgagactgggt

SEQ ID NO: 72248 - DNA, 40 bp, Homo sapiens
cccagtctcagcttcacttgtataccctggaaatagactg

SEQ ID NO: 72249 - DNA, 40 bp, Homo sapiens
cagtctatttccagggtatacaagtgaagctgagactggg

SEQ ID NO: 72250 - DNA, 40 bp, Homo sapiens
ccagtctcagcttcacttgtataccctggaaatagactga

SEQ ID NO: 72251 - DNA, 40 bp, Homo sapiens
tcagtctatttccagggtatacaagtgaagctgagactgg

SEQ ID NO: 72252 - DNA, 40 bp, Homo sapiens
cagtctcagcttcacttgtataccctggaaatagactgaa

SEQ ID NO: 72253 - DNA, 40 bp, Homo sapiens
ttcagtctatttccagggtatacaagtgaagctgagactg

SEQ ID NO: 72254 - DNA, 40 bp, Homo sapiens
agtctcagcttcacttgtataccctggaaatagactgaaa

SEQ ID NO: 72255 - DNA, 40 bp, Homo sapiens
tttcagtctatttccagggtatacaagtgaagctgagact

SEQ ID NO: 72256 - DNA, 40 bp, Homo sapiens
gtctcagcttcacttgtataccctggaaatagactgaaag

SEQ ID NO: 72257 - DNA, 40 bp, Homo sapiens
ctttcagtctatttccagggtatacaagtgaagctgagac

SEQ ID NO: 72258 - DNA, 40 bp, Homo sapiens
tctcagcttcacttgtataccctggaaatagactgaaagg

SEQ ID NO: 72259 - DNA, 40 bp, Homo sapiens
cctttcagtctatttccagggtatacaagtgaagctgaga

SEQ ID NO: 72260 - DNA, 40 bp, Homo sapiens
ctcagcttcacttgtataccctggaaatagactgaaaggt

SEQ ID NO: 72261 - DNA, 40 bp, Homo sapiens
acctttcagtctatttccagggtatacaagtgaagctgag

SEQ ID NO: 72262 - DNA, 40 bp, Homo sapiens
tcagcttcacttgtataccctggaaatagactgaaaggtg

SEQ ID NO: 72263 - DNA, 40 bp, Homo sapiens
cacctttcagtctatttccagggtatacaagtgaagctga

SEQ ID NO: 72264 - DNA, 40 bp, Homo sapiens
cagcttcacttgtataccctggaaatagactgaaaggtgt

SEQ ID NO: 72265 - DNA, 40 bp, Homo sapiens
acacctttcagtctatttccagggtatacaagtgaagctg

SEQ ID NO: 72266 - DNA, 40 bp, Homo sapiens
agcttcacttgtataccctggaaatagactgaaaggtgtt

SEQ ID NO: 72267 - DNA, 40 bp, Homo sapiens
aacacctttcagtctatttccagggtatacaagtgaagct

SEQ ID NO: 72268 - DNA, 40 bp, Homo sapiens
gcttcacttgtataccctggaaatagactgaaaggtgtta

SEQ ID NO: 72269 - DNA, 40 bp, Homo sapiens
taacacctttcagtctatttccagggtatacaagtgaagc

SEQ ID NO: 72270 - DNA, 40 bp, Homo sapiens
cttcacttgtataccctggaaatagactgaaaggtgttaa

SEQ ID NO: 72271 - DNA, 40 bp, Homo sapiens
ttaacacctttcagtctatttccagggtatacaagtgaag

SEQ ID NO: 72272 - DNA, 40 bp, Homo sapiens
ttcacttgtataccctggaaatagactgaaaggtgttaaa

SEQ ID NO: 72273 - DNA, 40 bp, Homo sapiens
tttaacacctttcagtctatttccagggtatacaagtgaa

SEQ ID NO: 72274 - DNA, 40 bp, Homo sapiens
tcacttgtataccctggaaatagactgaaaggtgttaaaa

SEQ ID NO: 72275 - DNA, 40 bp, Homo sapiens
ttttaacacctttcagtctatttccagggtatacaagtga

SEQ ID NO: 72276 - DNA, 40 bp, Homo sapiens
cacttgtataccctggaaatagactgaaaggtgttaaaat

SEQ ID NO: 72277 - DNA, 40 bp, Homo sapiens
attttaacacctttcagtctatttccagggtatacaagtg

SEQ ID NO: 72278 - DNA, 40 bp, Homo sapiens
acttgtataccctggaaatagactgaaaggtgttaaaatt

SEQ ID NO: 72279 - DNA, 40 bp, Homo sapiens
aattttaacacctttcagtctatttccagggtatacaagt

SEQ ID NO: 72280 - DNA, 40 bp, Homo sapiens
cttgtataccctggaaatagactgaaaggtgttaaaattt

SEQ ID NO: 72281 - DNA, 40 bp, Homo sapiens
aaattttaacacctttcagtctatttccagggtatacaag

SEQ ID NO: 72282 - DNA, 40 bp, Homo sapiens
ttgtataccctggaaatagactgaaaggtgttaaaattta

SEQ ID NO: 72283 - DNA, 40 bp, Homo sapiens
taaattttaacacctttcagtctatttccagggtatacaa

SEQ ID NO: 72284 - DNA, 40 bp, Homo sapiens
tgtataccctggaaatagactgaaaggtgttaaaatttaa

SEQ ID NO: 72285 - DNA, 40 bp, Homo sapiens
ttaaattttaacacctttcagtctatttccagggtataca

SEQ ID NO: 72286 - DNA, 40 bp, Homo sapiens
gtataccctggaaatagactgaaaggtgttaaaatttaag

SEQ ID NO: 72287 - DNA, 40 bp, Homo sapiens
cttaaattttaacacctttcagtctatttccagggtatac

SEQ ID NO: 72288 - DNA, 40 bp, Homo sapiens
tataccctggaaatagactgaaaggtgttaaaatttaaga

SEQ ID NO: 72289 - DNA, 40 bp, Homo sapiens
tcttaaattttaacacctttcagtctatttccagggtata

SEQ ID NO: 72290 - DNA, 40 bp, Homo sapiens
ataccctggaaatagactgaaaggtgttaaaatttaagat

SEQ ID NO: 72291 - DNA, 40 bp, Homo sapiens
atcttaaattttaacacctttcagtctatttccagggtat

SEQ ID NO: 72292 - DNA, 40 bp, Homo sapiens
taccctggaaatagactgaaaggtgttaaaatttaagata

SEQ ID NO: 72293 - DNA, 40 bp, Homo sapiens
tatcttaaattttaacacctttcagtctatttccagggta

SEQ ID NO: 72294 - DNA, 40 bp, Homo sapiens
accctggaaatagactgaaaggtgttaaaatttaagataa

SEQ ID NO: 72295 - DNA, 40 bp, Homo sapiens
ttatcttaaattttaacacctttcagtctatttccagggt

SEQ ID NO: 72296 - DNA, 40 bp, Homo sapiens
ccctggaaatagactgaaaggtgttaaaatttaagataaa

SEQ ID NO: 72297 - DNA, 40 bp, Homo sapiens
tttatcttaaattttaacacctttcagtctatttccaggg

SEQ ID NO: 72298 - DNA, 40 bp, Homo sapiens
cctggaaatagactgaaaggtgttaaaatttaagataaaa

SEQ ID NO: 72299 - DNA, 40 bp, Homo sapiens
ttttatcttaaattttaacacctttcagtctatttccagg

SEQ ID NO: 72300 - DNA, 40 bp, Homo sapiens
ctggaaatagactgaaaggtgttaaaatttaagataaaac

SEQ ID NO: 72301 - DNA, 40 bp, Homo sapiens
gttttatcttaaattttaacacctttcagtctatttccag

SEQ ID NO: 72302 - DNA, 40 bp, Homo sapiens
tggaaatagactgaaaggtgttaaaatttaagataaaact

SEQ ID NO: 72303 - DNA, 40 bp, Homo sapiens
agttttatcttaaattttaacacctttcagtctatttcca

SEQ ID NO: 72304 - DNA, 40 bp, Homo sapiens
ggaaatagactgaaaggtgttaaaatttaagataaaactc

SEQ ID NO: 72305 - DNA, 40 bp, Homo sapiens
gagttttatcttaaattttaacacctttcagtctatttcc

SEQ ID NO: 72306 - DNA, 40 bp, Homo sapiens
gaaatagactgaaaggtgttaaaatttaagataaaactca

SEQ ID NO: 72307 - DNA, 40 bp, Homo sapiens
tgagttttatcttaaattttaacacctttcagtctatttc

SEQ ID NO: 72308 - DNA, 40 bp, Homo sapiens
aaatagactgaaaggtgttaaaatttaagataaaactcaa

SEQ ID NO: 72309 - DNA, 40 bp, Homo sapiens
ttgagttttatcttaaattttaacacctttcagtctattt

SEQ ID NO: 72310 - DNA, 40 bp, Homo sapiens
aatagactgaaaggtgttaaaatttaagataaaactcaag

SEQ ID NO: 72311 - DNA, 40 bp, Homo sapiens
cttgagttttatcttaaattttaacacctttcagtctatt

SEQ ID NO: 72312 - DNA, 40 bp, Homo sapiens
atagactgaaaggtgttaaaatttaagataaaactcaagg

SEQ ID NO: 72313 - DNA, 40 bp, Homo sapiens
ccttgagttttatcttaaattttaacacctttcagtctat

SEQ ID NO: 72314 - DNA, 40 bp, Homo sapiens
tagactgaaaggtgttaaaatttaagataaaactcaaggt

SEQ ID NO: 72315 - DNA, 40 bp, Homo sapiens
accttgagttttatcttaaattttaacacctttcagtcta

SEQ ID NO: 72316 - DNA, 40 bp, Homo sapiens
agactgaaaggtgttaaaatttaagataaaactcaaggtt

SEQ ID NO: 72317 - DNA, 40 bp, Homo sapiens
aaccttgagttttatcttaaattttaacacctttcagtct

SEQ ID NO: 72318 - DNA, 40 bp, Homo sapiens
gactgaaaggtgttaaaatttaagataaaactcaaggttc

SEQ ID NO: 72319 - DNA, 40 bp, Homo sapiens
gaaccttgagttttatcttaaattttaacacctttcagtc

SEQ ID NO: 72320 - DNA, 40 bp, Homo sapiens
actgaaaggtgttaaaatttaagataaaactcaaggttcc

SEQ ID NO: 72321 - DNA, 40 bp, Homo sapiens
ggaaccttgagttttatcttaaattttaacacctttcagt

SEQ ID NO: 72322 - DNA, 40 bp, Homo sapiens
ctgaaaggtgttaaaatttaagataaaactcaaggttcca

SEQ ID NO: 72323 - DNA, 40 bp, Homo sapiens
tggaaccttgagttttatcttaaattttaacacctttcag

SEQ ID NO: 72324 - DNA, 40 bp, Homo sapiens
tgaaaggtgttaaaatttaagataaaactcaaggttccag

SEQ ID NO: 72325 - DNA, 40 bp, Homo sapiens
ctggaaccttgagttttatcttaaattttaacacctttca

SEQ ID NO: 72326 - DNA, 40 bp, Homo sapiens
gaaaggtgttaaaatttaagataaaactcaaggttccagt

SEQ ID NO: 72327 - DNA, 40 bp, Homo sapiens
actggaaccttgagttttatcttaaattttaacacctttc

SEQ ID NO: 72328 - DNA, 40 bp, Homo sapiens
aaaggtgttaaaatttaagataaaactcaaggttccagtt

SEQ ID NO: 72329 - DNA, 40 bp, Homo sapiens
aactggaaccttgagttttatcttaaattttaacaccttt

SEQ ID NO: 72330 - DNA, 40 bp, Homo sapiens
aaggtgttaaaatttaagataaaactcaaggttccagttt

SEQ ID NO: 72331 - DNA, 40 bp, Homo sapiens
aaactggaaccttgagttttatcttaaattttaacacctt

SEQ ID NO: 72332 - DNA, 40 bp, Homo sapiens
aggtgttaaaatttaagataaaactcaaggttccagtttc

SEQ ID NO: 72333 - DNA, 40 bp, Homo sapiens
gaaactggaaccttgagttttatcttaaattttaacacct

SEQ ID NO: 72334 - DNA, 40 bp, Homo sapiens
ggtgttaaaatttaagataaaactcaaggttccagtttct

SEQ ID NO: 72335 - DNA, 40 bp, Homo sapiens
agaaactggaaccttgagttttatcttaaattttaacacc

SEQ ID NO: 72336 - DNA, 40 bp, Homo sapiens
gtgttaaaatttaagataaaactcaaggttccagtttctt

SEQ ID NO: 72337 - DNA, 40 bp, Homo sapiens
aagaaactggaaccttgagttttatcttaaattttaacac

SEQ ID NO: 72338 - DNA, 40 bp, Homo sapiens
tgttaaaatttaagataaaactcaaggttccagtttcttg

SEQ ID NO: 72339 - DNA, 40 bp, Homo sapiens
caagaaactggaaccttgagttttatcttaaattttaaca

SEQ ID NO: 72340 - DNA, 40 bp, Homo sapiens
gttaaaatttaagataaaactcaaggttccagtttcttga

SEQ ID NO: 72341 - DNA, 40 bp, Homo sapiens
tcaagaaactggaaccttgagttttatcttaaattttaac

SEQ ID NO: 72342 - DNA, 40 bp, Homo sapiens
ttaaaatttaagataaaactcaaggttccagtttcttgac

SEQ ID NO: 72343 - DNA, 40 bp, Homo sapiens
gtcaagaaactggaaccttgagttttatcttaaattttaa

SEQ ID NO: 72344 - DNA, 40 bp, Homo sapiens
taaaatttaagataaaactcaaggttccagtttcttgact

SEQ ID NO: 72345 - DNA, 40 bp, Homo sapiens
agtcaagaaactggaaccttgagttttatcttaaatttta

SEQ ID NO: 72346 - DNA, 40 bp, Homo sapiens
aaaatttaagataaaactcaaggttccagtttcttgactc

SEQ ID NO: 72347 - DNA, 40 bp, Homo sapiens
gagtcaagaaactggaaccttgagttttatcttaaatttt

SEQ ID NO: 72348 - DNA, 40 bp, Homo sapiens
aaatttaagataaaactcaaggttccagtttcttgactca

SEQ ID NO: 72349 - DNA, 40 bp, Homo sapiens
tgagtcaagaaactggaaccttgagttttatcttaaattt

SEQ ID NO: 72350 - DNA, 40 bp, Homo sapiens
aatttaagataaaactcaaggttccagtttcttgactcac

SEQ ID NO: 72351 - DNA, 40 bp, Homo sapiens
gtgagtcaagaaactggaaccttgagttttatcttaaatt

SEQ ID NO: 72352 - DNA, 40 bp, Homo sapiens
atttaagataaaactcaaggttccagtttcttgactcacc

SEQ ID NO: 72353 - DNA, 40 bp, Homo sapiens
ggtgagtcaagaaactggaaccttgagttttatcttaaat

SEQ ID NO: 72354 - DNA, 40 bp, Homo sapiens
tttaagataaaactcaaggttccagtttcttgactcacct

SEQ ID NO: 72355 - DNA, 40 bp, Homo sapiens
aggtgagtcaagaaactggaaccttgagttttatcttaaa

SEQ ID NO: 72356 - DNA, 40 bp, Homo sapiens
ttaagataaaactcaaggttccagtttcttgactcacctt

SEQ ID NO: 72357 - DNA, 40 bp, Homo sapiens
aaggtgagtcaagaaactggaaccttgagttttatcttaa

SEQ ID NO: 72358 - DNA, 40 bp, Homo sapiens
taagataaaactcaaggttccagtttcttgactcaccttt

SEQ ID NO: 72359 - DNA, 40 bp, Homo sapiens
aaaggtgagtcaagaaactggaaccttgagttttatctta

SEQ ID NO: 72360 - DNA, 40 bp, Homo sapiens
aagataaaactcaaggttccagtttcttgactcacctttg

SEQ ID NO: 72361 - DNA, 40 bp, Homo sapiens
caaaggtgagtcaagaaactggaaccttgagttttatctt

SEQ ID NO: 72362 - DNA, 40 bp, Homo sapiens
agataaaactcaaggttccagtttcttgactcacctttga

SEQ ID NO: 72363 - DNA, 40 bp, Homo sapiens
tcaaaggtgagtcaagaaactggaaccttgagttttatct

SEQ ID NO: 72364 - DNA, 40 bp, Homo sapiens
gataaaactcaaggttccagtttcttgactcacctttgag

SEQ ID NO: 72365 - DNA, 40 bp, Homo sapiens
ctcaaaggtgagtcaagaaactggaaccttgagttttatc

SEQ ID NO: 72366 - DNA, 40 bp, Homo sapiens
ataaaactcaaggttccagtttcttgactcacctttgaga

SEQ ID NO: 72367 - DNA, 40 bp, Homo sapiens
tctcaaaggtgagtcaagaaactggaaccttgagttttat

SEQ ID NO: 72368 - DNA, 40 bp, Homo sapiens
taaaactcaaggttccagtttcttgactcacctttgagat

SEQ ID NO: 72369 - DNA, 40 bp, Homo sapiens
atctcaaaggtgagtcaagaaactggaaccttgagtttta

SEQ ID NO: 72370 - DNA, 40 bp, Homo sapiens
aaaactcaaggttccagtttcttgactcacctttgagatt

SEQ ID NO: 72371 - DNA, 40 bp, Homo sapiens
aatctcaaaggtgagtcaagaaactggaaccttgagtttt

SEQ ID NO: 72372 - DNA, 40 bp, Homo sapiens
aaactcaaggttccagtttcttgactcacctttgagattc

SEQ ID NO: 72373 - DNA, 40 bp, Homo sapiens
gaatctcaaaggtgagtcaagaaactggaaccttgagttt

SEQ ID NO: 72374 - DNA, 40 bp, Homo sapiens
aactcaaggttccagtttcttgactcacctttgagattct

SEQ ID NO: 72375 - DNA, 40 bp, Homo sapiens
agaatctcaaaggtgagtcaagaaactggaaccttgagtt

SEQ ID NO: 72376 - DNA, 40 bp, Homo sapiens
actcaaggttccagtttcttgactcacctttgagattctt

SEQ ID NO: 72377 - DNA, 40 bp, Homo sapiens
aagaatctcaaaggtgagtcaagaaactggaaccttgagt

SEQ ID NO: 72378 - DNA, 40 bp, Homo sapiens
ctcaaggttccagtttcttgactcacctttgagattcttt

SEQ ID NO: 72379 - DNA, 40 bp, Homo sapiens
aaagaatctcaaaggtgagtcaagaaactggaaccttgag

SEQ ID NO: 72380 - DNA, 40 bp, Homo sapiens
tcaaggttccagtttcttgactcacctttgagattctttt

SEQ ID NO: 72381 - DNA, 40 bp, Homo sapiens
aaaagaatctcaaaggtgagtcaagaaactggaaccttga

SEQ ID NO: 72382 - DNA, 40 bp, Homo sapiens
caaggttccagtttcttgactcacctttgagattctttta

SEQ ID NO: 72383 - DNA, 40 bp, Homo sapiens
taaaagaatctcaaaggtgagtcaagaaactggaaccttg

SEQ ID NO: 72384 - DNA, 40 bp, Homo sapiens
aaggttccagtttcttgactcacctttgagattcttttat

SEQ ID NO: 72385 - DNA, 40 bp, Homo sapiens
ataaaagaatctcaaaggtgagtcaagaaactggaacctt

SEQ ID NO: 72386 - DNA, 40 bp, Homo sapiens
aggttccagtttcttgactcacctttgagattcttttatg

SEQ ID NO: 72387 - DNA, 40 bp, Homo sapiens
cataaaagaatctcaaaggtgagtcaagaaactggaacct

SEQ ID NO: 72388 - DNA, 40 bp, Homo sapiens
ggttccagtttcttgactcacctttgagattcttttatgt

SEQ ID NO: 72389 - DNA, 40 bp, Homo sapiens
acataaaagaatctcaaaggtgagtcaagaaactggaacc

SEQ ID NO: 72390 - DNA, 40 bp, Homo sapiens
gttccagtttcttgactcacctttgagattcttttatgtt

SEQ ID NO: 72391 - DNA, 40 bp, Homo sapiens
aacataaaagaatctcaaaggtgagtcaagaaactggaac

SEQ ID NO: 72392 - DNA, 40 bp, Homo sapiens
ttccagtttcttgactcacctttgagattcttttatgttt

SEQ ID NO: 72393 - DNA, 40 bp, Homo sapiens
aaacataaaagaatctcaaaggtgagtcaagaaactggaa

SEQ ID NO: 72394 - DNA, 40 bp, Homo sapiens
tccagtttcttgactcacctttgagattcttttatgtttt

SEQ ID NO: 72395 - DNA, 40 bp, Homo sapiens
aaaacataaaagaatctcaaaggtgagtcaagaaactgga

SEQ ID NO: 72396 - DNA, 40 bp, Homo sapiens
ccagtttcttgactcacctttgagattcttttatgttttt

SEQ ID NO: 72397 - DNA, 40 bp, Homo sapiens
aaaaacataaaagaatctcaaaggtgagtcaagaaactgg

SEQ ID NO: 72398 - DNA, 40 bp, Homo sapiens
cagtttcttgactcacctttgagattcttttatgtttttg

SEQ ID NO: 72399 - DNA, 40 bp, Homo sapiens
caaaaacataaaagaatctcaaaggtgagtcaagaaactg

SEQ ID NO: 72400 - DNA, 40 bp, Homo sapiens
agtttcttgactcacctttgagattcttttatgtttttgt

SEQ ID NO: 72401 - DNA, 40 bp, Homo sapiens
acaaaaacataaaagaatctcaaaggtgagtcaagaaact

SEQ ID NO: 72402 - DNA, 40 bp, Homo sapiens
gtttcttgactcacctttgagattcttttatgtttttgtt

SEQ ID NO: 72403 - DNA, 40 bp, Homo sapiens
aacaaaaacataaaagaatctcaaaggtgagtcaagaaac

SEQ ID NO: 72404 - DNA, 40 bp, Homo sapiens
tttcttgactcacctttgagattcttttatgtttttgttg

SEQ ID NO: 72405 - DNA, 40 bp, Homo sapiens
caacaaaaacataaaagaatctcaaaggtgagtcaagaaa

SEQ ID NO: 72406 - DNA, 40 bp, Homo sapiens
ttcttgactcacctttgagattcttttatgtttttgttgt

SEQ ID NO: 72407 - DNA, 40 bp, Homo sapiens
acaacaaaaacataaaagaatctcaaaggtgagtcaagaa

SEQ ID NO: 72408 - DNA, 40 bp, Homo sapiens
tcttgactcacctttgagattcttttatgtttttgttgtt

SEQ ID NO: 72409 - DNA, 40 bp, Homo sapiens
aacaacaaaaacataaaagaatctcaaaggtgagtcaaga

SEQ ID NO: 72410 - DNA, 40 bp, Homo sapiens
cttgactcacctttgagattcttttatgtttttgttgttt

SEQ ID NO: 72411 - DNA, 40 bp, Homo sapiens
aaacaacaaaaacataaaagaatctcaaaggtgagtcaag

SEQ ID NO: 72412 - DNA, 40 bp, Homo sapiens
ttgactcacctttgagattcttttatgtttttgttgtttt

SEQ ID NO: 72413 - DNA, 40 bp, Homo sapiens
aaaacaacaaaaacataaaagaatctcaaaggtgagtcaa

SEQ ID NO: 72414 - DNA, 40 bp, Homo sapiens
tgactcacctttgagattcttttatgtttttgttgttttt

SEQ ID NO: 72415 - DNA, 40 bp, Homo sapiens
aaaaacaacaaaaacataaaagaatctcaaaggtgagtca

SEQ ID NO: 72416 - DNA, 40 bp, Homo sapiens
gactcacctttgagattcttttatgtttttgttgtttttt

SEQ ID NO: 72417 - DNA, 40 bp, Homo sapiens
aaaaaacaacaaaaacataaaagaatctcaaaggtgagtc

SEQ ID NO: 72418 - DNA, 40 bp, Homo sapiens
actcacctttgagattcttttatgtttttgttgtttttta

SEQ ID NO: 72419 - DNA, 40 bp, Homo sapiens
taaaaaacaacaaaaacataaaagaatctcaaaggtgagt

SEQ ID NO: 72420 - DNA, 40 bp, Homo sapiens
ctcacctttgagattcttttatgtttttgttgttttttaa

SEQ ID NO: 72421 - DNA, 40 bp, Homo sapiens
ttaaaaaacaacaaaaacataaaagaatctcaaaggtgag

SEQ ID NO: 72422 - DNA, 40 bp, Homo sapiens
tcacctttgagattcttttatgtttttgttgttttttaac

SEQ ID NO: 72423 - DNA, 40 bp, Homo sapiens
gttaaaaaacaacaaaaacataaaagaatctcaaaggtga

SEQ ID NO: 72424 - DNA, 40 bp, Homo sapiens
cacctttgagattcttttatgtttttgttgttttttaaca

SEQ ID NO: 72425 - DNA, 40 bp, Homo sapiens
tgttaaaaaacaacaaaaacataaaagaatctcaaaggtg

SEQ ID NO: 72426 - DNA, 40 bp, Homo sapiens
acctttgagattcttttatgtttttgttgttttttaacaa

SEQ ID NO: 72427 - DNA, 40 bp, Homo sapiens
ttgttaaaaaacaacaaaaacataaaagaatctcaaaggt

SEQ ID NO: 72428 - DNA, 40 bp, Homo sapiens
cctttgagattcttttatgtttttgttgttttttaacaaa

SEQ ID NO: 72429 - DNA, 40 bp, Homo sapiens
tttgttaaaaaacaacaaaaacataaaagaatctcaaagg

SEQ ID NO: 72430 - DNA, 40 bp, Homo sapiens
ctttgagattcttttatgtttttgttgttttttaacaaag

SEQ ID NO: 72431 - DNA, 40 bp, Homo sapiens
ctttgttaaaaaacaacaaaaacataaaagaatctcaaag

SEQ ID NO: 72432 - DNA, 40 bp, Homo sapiens
tttgagattcttttatgtttttgttgttttttaacaaagg

SEQ ID NO: 72433 - DNA, 40 bp, Homo sapiens
cctttgttaaaaaacaacaaaaacataaaagaatctcaaa

SEQ ID NO: 72434 - DNA, 40 bp, Homo sapiens
ttgagattcttttatgtttttgttgttttttaacaaaggt

SEQ ID NO: 72435 - DNA, 40 bp, Homo sapiens
acctttgttaaaaaacaacaaaaacataaaagaatctcaa

SEQ ID NO: 72436 - DNA, 40 bp, Homo sapiens
tgagattcttttatgtttttgttgttttttaacaaaggtt

SEQ ID NO: 72437 - DNA, 40 bp, Homo sapiens
aacctttgttaaaaaacaacaaaaacataaaagaatctca

SEQ ID NO: 72438 - DNA, 40 bp, Homo sapiens
gagattcttttatgtttttgttgttttttaacaaaggttt

SEQ ID NO: 72439 - DNA, 40 bp, Homo sapiens
aaacctttgttaaaaaacaacaaaaacataaaagaatctc

SEQ ID NO: 72440 - DNA, 40 bp, Homo sapiens
agattcttttatgtttttgttgttttttaacaaaggtttc

SEQ ID NO: 72441 - DNA, 40 bp, Homo sapiens
gaaacctttgttaaaaaacaacaaaaacataaaagaatct

SEQ ID NO: 72442 - DNA, 40 bp, Homo sapiens
gattcttttatgtttttgttgttttttaacaaaggtttca

SEQ ID NO: 72443 - DNA, 40 bp, Homo sapiens
tgaaacctttgttaaaaaacaacaaaaacataaaagaatc

SEQ ID NO: 72444 - DNA, 40 bp, Homo sapiens
attcttttatgtttttgttgttttttaacaaaggtttcac

SEQ ID NO: 72445 - DNA, 40 bp, Homo sapiens
gtgaaacctttgttaaaaaacaacaaaaacataaaagaat

SEQ ID NO: 72446 - DNA, 40 bp, Homo sapiens
ttcttttatgtttttgttgttttttaacaaaggtttcacg

SEQ ID NO: 72447 - DNA, 40 bp, Homo sapiens
cgtgaaacctttgttaaaaaacaacaaaaacataaaagaa

SEQ ID NO: 72448 - DNA, 40 bp, Homo sapiens
tcttttatgtttttgttgttttttaacaaaggtttcacgt

SEQ ID NO: 72449 - DNA, 40 bp, Homo sapiens
acgtgaaacctttgttaaaaaacaacaaaaacataaaaga

SEQ ID NO: 72450 - DNA, 40 bp, Homo sapiens
cttttatgtttttgttgttttttaacaaaggtttcacgtc

SEQ ID NO: 72451 - DNA, 40 bp, Homo sapiens
gacgtgaaacctttgttaaaaaacaacaaaaacataaaag

SEQ ID NO: 72452 - DNA, 40 bp, Homo sapiens
ttttatgtttttgttgttttttaacaaaggtttcacgtcc

SEQ ID NO: 72453 - DNA, 40 bp, Homo sapiens
ggacgtgaaacctttgttaaaaaacaacaaaaacataaaa

SEQ ID NO: 72454 - DNA, 40 bp, Homo sapiens
tttatgtttttgttgttttttaacaaaggtttcacgtcca

SEQ ID NO: 72455 - DNA, 40 bp, Homo sapiens
tggacgtgaaacctttgttaaaaaacaacaaaaacataaa

SEQ ID NO: 72456 - DNA, 40 bp, Homo sapiens
ttatgtttttgttgttttttaacaaaggtttcacgtccat

SEQ ID NO: 72457 - DNA, 40 bp, Homo sapiens
atggacgtgaaacctttgttaaaaaacaacaaaaacataa

SEQ ID NO: 72458 - DNA, 40 bp, Homo sapiens
tatgtttttgttgttttttaacaaaggtttcacgtccata

SEQ ID NO: 72459 - DNA, 40 bp, Homo sapiens
tatggacgtgaaacctttgttaaaaaacaacaaaaacata

SEQ ID NO: 72460 - DNA, 40 bp, Homo sapiens
atgtttttgttgttttttaacaaaggtttcacgtccatat

SEQ ID NO: 72461 - DNA, 40 bp, Homo sapiens
atatggacgtgaaacctttgttaaaaaacaacaaaaacat

SEQ ID NO: 72462 - DNA, 40 bp, Homo sapiens
tgtttttgttgttttttaacaaaggtttcacgtccatatt

SEQ ID NO: 72463 - DNA, 40 bp, Homo sapiens
aatatggacgtgaaacctttgttaaaaaacaacaaaaaca

SEQ ID NO: 72464 - DNA, 40 bp, Homo sapiens
gtttttgttgttttttaacaaaggtttcacgtccatattt

SEQ ID NO: 72465 - DNA, 40 bp, Homo sapiens
aaatatggacgtgaaacctttgttaaaaaacaacaaaaac

SEQ ID NO: 72466 - DNA, 40 bp, Homo sapiens
tttttgttgttttttaacaaaggtttcacgtccatatttt

SEQ ID NO: 72467 - DNA, 40 bp, Homo sapiens
aaaatatggacgtgaaacctttgttaaaaaacaacaaaaa

SEQ ID NO: 72468 - DNA, 40 bp, Homo sapiens
ttttgttgttttttaacaaaggtttcacgtccatatttta

SEQ ID NO: 72469 - DNA, 40 bp, Homo sapiens
taaaatatggacgtgaaacctttgttaaaaaacaacaaaa

SEQ ID NO: 72470 - DNA, 40 bp, Homo sapiens
tttgttgttttttaacaaaggtttcacgtccatattttac

SEQ ID NO: 72471 - DNA, 40 bp, Homo sapiens
gtaaaatatggacgtgaaacctttgttaaaaaacaacaaa

SEQ ID NO: 72472 - DNA, 40 bp, Homo sapiens
ttgttgttttttaacaaaggtttcacgtccatattttacc

SEQ ID NO: 72473 - DNA, 40 bp, Homo sapiens
ggtaaaatatggacgtgaaacctttgttaaaaaacaacaa

SEQ ID NO: 72474 - DNA, 40 bp, Homo sapiens
tgttgttttttaacaaaggtttcacgtccatattttacca

SEQ ID NO: 72475 - DNA, 40 bp, Homo sapiens
tggtaaaatatggacgtgaaacctttgttaaaaaacaaca

SEQ ID NO: 72476 - DNA, 40 bp, Homo sapiens
gttgttttttaacaaaggtttcacgtccatattttaccat

SEQ ID NO: 72477 - DNA, 40 bp, Homo sapiens
atggtaaaatatggacgtgaaacctttgttaaaaaacaac

SEQ ID NO: 72478 - DNA, 40 bp, Homo sapiens
ttgttttttaacaaaggtttcacgtccatattttaccatt

SEQ ID NO: 72479 - DNA, 40 bp, Homo sapiens
aatggtaaaatatggacgtgaaacctttgttaaaaaacaa

SEQ ID NO: 72480 - DNA, 40 bp, Homo sapiens
tgttttttaacaaaggtttcacgtccatattttaccattt

SEQ ID NO: 72481 - DNA, 40 bp, Homo sapiens
aaatggtaaaatatggacgtgaaacctttgttaaaaaaca

SEQ ID NO: 72482 - DNA, 40 bp, Homo sapiens
gttttttaacaaaggtttcacgtccatattttaccatttt

SEQ ID NO: 72483 - DNA, 40 bp, Homo sapiens
aaaatggtaaaatatggacgtgaaacctttgttaaaaaac

SEQ ID NO: 72484 - DNA, 40 bp, Homo sapiens
ttttttaacaaaggtttcacgtccatattttaccattttt

SEQ ID NO: 72485 - DNA, 40 bp, Homo sapiens
aaaaatggtaaaatatggacgtgaaacctttgttaaaaaa

SEQ ID NO: 72486 - DNA, 40 bp, Homo sapiens
tttttaacaaaggtttcacgtccatattttaccatttttc

SEQ ID NO: 72487 - DNA, 40 bp, Homo sapiens
gaaaaatggtaaaatatggacgtgaaacctttgttaaaaa

SEQ ID NO: 72488 - DNA, 40 bp, Homo sapiens
ttttaacaaaggtttcacgtccatattttaccatttttct

SEQ ID NO: 72489 - DNA, 40 bp, Homo sapiens
agaaaaatggtaaaatatggacgtgaaacctttgttaaaa

SEQ ID NO: 72490 - DNA, 40 bp, Homo sapiens
tttaacaaaggtttcacgtccatattttaccatttttctt

SEQ ID NO: 72491 - DNA, 40 bp, Homo sapiens
aagaaaaatggtaaaatatggacgtgaaacctttgttaaa

SEQ ID NO: 72492 - DNA, 40 bp, Homo sapiens
ttaacaaaggtttcacgtccatattttaccatttttcttc

SEQ ID NO: 72493 - DNA, 40 bp, Homo sapiens
gaagaaaaatggtaaaatatggacgtgaaacctttgttaa

SEQ ID NO: 72494 - DNA, 40 bp, Homo sapiens
taacaaaggtttcacgtccatattttaccatttttcttct

SEQ ID NO: 72495 - DNA, 40 bp, Homo sapiens
agaagaaaaatggtaaaatatggacgtgaaacctttgtta

SEQ ID NO: 72496 - DNA, 40 bp, Homo sapiens
aacaaaggtttcacgtccatattttaccatttttcttctc

SEQ ID NO: 72497 - DNA, 40 bp, Homo sapiens
gagaagaaaaatggtaaaatatggacgtgaaacctttgtt

SEQ ID NO: 72498 - DNA, 40 bp, Homo sapiens
acaaaggtttcacgtccatattttaccatttttcttctca

SEQ ID NO: 72499 - DNA, 40 bp, Homo sapiens
tgagaagaaaaatggtaaaatatggacgtgaaacctttgt

SEQ ID NO: 72500 - DNA, 40 bp, Homo sapiens
caaaggtttcacgtccatattttaccatttttcttctcat

SEQ ID NO: 72501 - DNA, 40 bp, Homo sapiens
atgagaagaaaaatggtaaaatatggacgtgaaacctttg

SEQ ID NO: 72502 - DNA, 40 bp, Homo sapiens
aaaggtttcacgtccatattttaccatttttcttctcatt

SEQ ID NO: 72503 - DNA, 40 bp, Homo sapiens
aatgagaagaaaaatggtaaaatatggacgtgaaaccttt

SEQ ID NO: 72504 - DNA, 40 bp, Homo sapiens
aaggtttcacgtccatattttaccatttttcttctcattc

SEQ ID NO: 72505 - DNA, 40 bp, Homo sapiens
gaatgagaagaaaaatggtaaaatatggacgtgaaacctt

SEQ ID NO: 72506 - DNA, 40 bp, Homo sapiens
aggtttcacgtccatattttaccatttttcttctcattct

SEQ ID NO: 72507 - DNA, 40 bp, Homo sapiens
agaatgagaagaaaaatggtaaaatatggacgtgaaacct

SEQ ID NO: 72508 - DNA, 40 bp, Homo sapiens
ggtttcacgtccatattttaccatttttcttctcattctc

SEQ ID NO: 72509 - DNA, 40 bp, Homo sapiens
gagaatgagaagaaaaatggtaaaatatggacgtgaaacc

SEQ ID NO: 72510 - DNA, 40 bp, Homo sapiens
gtttcacgtccatattttaccatttttcttctcattctcc

SEQ ID NO: 72511 - DNA, 40 bp, Homo sapiens
ggagaatgagaagaaaaatggtaaaatatggacgtgaaac

SEQ ID NO: 72512 - DNA, 40 bp, Homo sapiens
tttcacgtccatattttaccatttttcttctcattctccc

SEQ ID NO: 72513 - DNA, 40 bp, Homo sapiens
gggagaatgagaagaaaaatggtaaaatatggacgtgaaa

SEQ ID NO: 72514 - DNA, 40 bp, Homo sapiens
ttcacgtccatattttaccatttttcttctcattctcccc

SEQ ID NO: 72515 - DNA, 40 bp, Homo sapiens
ggggagaatgagaagaaaaatggtaaaatatggacgtgaa

SEQ ID NO: 72516 - DNA, 40 bp, Homo sapiens
tcacgtccatattttaccatttttcttctcattctcccct

SEQ ID NO: 72517 - DNA, 40 bp, Homo sapiens
aggggagaatgagaagaaaaatggtaaaatatggacgtga

SEQ ID NO: 72518 - DNA, 40 bp, Homo sapiens
cacgtccatattttaccatttttcttctcattctcccctg

SEQ ID NO: 72519 - DNA, 40 bp, Homo sapiens
caggggagaatgagaagaaaaatggtaaaatatggacgtg

SEQ ID NO: 72520 - DNA, 40 bp, Homo sapiens
acgtccatattttaccatttttcttctcattctcccctgg

SEQ ID NO: 72521 - DNA, 40 bp, Homo sapiens
ccaggggagaatgagaagaaaaatggtaaaatatggacgt

SEQ ID NO: 72522 - DNA, 40 bp, Homo sapiens
cgtccatattttaccatttttcttctcattctcccctgga

SEQ ID NO: 72523 - DNA, 40 bp, Homo sapiens
tccaggggagaatgagaagaaaaatggtaaaatatggacg

SEQ ID NO: 72524 - DNA, 40 bp, Homo sapiens
gtccatattttaccatttttcttctcattctcccctggag

SEQ ID NO: 72525 - DNA, 40 bp, Homo sapiens
ctccaggggagaatgagaagaaaaatggtaaaatatggac

SEQ ID NO: 72526 - DNA, 40 bp, Homo sapiens
tccatattttaccatttttcttctcattctcccctggagg

SEQ ID NO: 72527 - DNA, 40 bp, Homo sapiens
cctccaggggagaatgagaagaaaaatggtaaaatatgga

SEQ ID NO: 72528 - DNA, 40 bp, Homo sapiens
ccatattttaccatttttcttctcattctcccctggagga

SEQ ID NO: 72529 - DNA, 40 bp, Homo sapiens
tcctccaggggagaatgagaagaaaaatggtaaaatatgg

SEQ ID NO: 72530 - DNA, 40 bp, Homo sapiens
catattttaccatttttcttctcattctcccctggaggag

SEQ ID NO: 72531 - DNA, 40 bp, Homo sapiens
ctcctccaggggagaatgagaagaaaaatggtaaaatatg

SEQ ID NO: 72532 - DNA, 40 bp, Homo sapiens
atattttaccatttttcttctcattctcccctggaggagg

SEQ ID NO: 72533 - DNA, 40 bp, Homo sapiens
cctcctccaggggagaatgagaagaaaaatggtaaaatat

SEQ ID NO: 72534 - DNA, 40 bp, Homo sapiens
tattttaccatttttcttctcattctcccctggaggaggg

SEQ ID NO: 72535 - DNA, 40 bp, Homo sapiens
ccctcctccaggggagaatgagaagaaaaatggtaaaata

SEQ ID NO: 72536 - DNA, 40 bp, Homo sapiens
attttaccatttttcttctcattctcccctggaggagggt

SEQ ID NO: 72537 - DNA, 40 bp, Homo sapiens
accctcctccaggggagaatgagaagaaaaatggtaaaat

SEQ ID NO: 72538 - DNA, 40 bp, Homo sapiens
ttttaccatttttcttctcattctcccctggaggagggtg

SEQ ID NO: 72539 - DNA, 40 bp, Homo sapiens
caccctcctccaggggagaatgagaagaaaaatggtaaaa

SEQ ID NO: 72540 - DNA, 40 bp, Homo sapiens
tttaccatttttcttctcattctcccctggaggagggtgt

SEQ ID NO: 72541 - DNA, 40 bp, Homo sapiens
acaccctcctccaggggagaatgagaagaaaaatggtaaa

SEQ ID NO: 72542 - DNA, 40 bp, Homo sapiens
ttaccatttttcttctcattctcccctggaggagggtgtg

SEQ ID NO: 72543 - DNA, 40 bp, Homo sapiens
cacaccctcctccaggggagaatgagaagaaaaatggtaa

SEQ ID NO: 72544 - DNA, 40 bp, Homo sapiens
taccatttttcttctcattctcccctggaggagggtgtgg

SEQ ID NO: 72545 - DNA, 40 bp, Homo sapiens
ccacaccctcctccaggggagaatgagaagaaaaatggta

SEQ ID NO: 72546 - DNA, 40 bp, Homo sapiens
accatttttcttctcattctcccctggaggagggtgtggg

SEQ ID NO: 72547 - DNA, 40 bp, Homo sapiens
cccacaccctcctccaggggagaatgagaagaaaaatggt

SEQ ID NO: 72548 - DNA, 40 bp, Homo sapiens
ccatttttcttctcattctcccctggaggagggtgtggga

SEQ ID NO: 72549 - DNA, 40 bp, Homo sapiens
tcccacaccctcctccaggggagaatgagaagaaaaatgg

SEQ ID NO: 72550 - DNA, 40 bp, Homo sapiens
catttttcttctcattctcccctggaggagggtgtgggaa

SEQ ID NO: 72551 - DNA, 40 bp, Homo sapiens
ttcccacaccctcctccaggggagaatgagaagaaaaatg

SEQ ID NO: 72552 - DNA, 40 bp, Homo sapiens
atttttcttctcattctcccctggaggagggtgtgggaat

SEQ ID NO: 72553 - DNA, 40 bp, Homo sapiens
attcccacaccctcctccaggggagaatgagaagaaaaat

SEQ ID NO: 72554 - DNA, 40 bp, Homo sapiens
tttttcttctcattctcccctggaggagggtgtgggaatc

SEQ ID NO: 72555 - DNA, 40 bp, Homo sapiens
gattcccacaccctcctccaggggagaatgagaagaaaaa

SEQ ID NO: 72556 - DNA, 40 bp, Homo sapiens
ttttcttctcattctcccctggaggagggtgtgggaatcg

SEQ ID NO: 72557 - DNA, 40 bp, Homo sapiens
cgattcccacaccctcctccaggggagaatgagaagaaaa

SEQ ID NO: 72558 - DNA, 40 bp, Homo sapiens
tttcttctcattctcccctggaggagggtgtgggaatcga

SEQ ID NO: 72559 - DNA, 40 bp, Homo sapiens
tcgattcccacaccctcctccaggggagaatgagaagaaa

SEQ ID NO: 72560 - DNA, 40 bp, Homo sapiens
ttcttctcattctcccctggaggagggtgtgggaatcgat

SEQ ID NO: 72561 - DNA, 40 bp, Homo sapiens
atcgattcccacaccctcctccaggggagaatgagaagaa

SEQ ID NO: 72562 - DNA, 40 bp, Homo sapiens
tcttctcattctcccctggaggagggtgtgggaatcgata

SEQ ID NO: 72563 - DNA, 40 bp, Homo sapiens
tatcgattcccacaccctcctccaggggagaatgagaaga

SEQ ID NO: 72564 - DNA, 40 bp, Homo sapiens
cttctcattctcccctggaggagggtgtgggaatcgatag

SEQ ID NO: 72565 - DNA, 40 bp, Homo sapiens
ctatcgattcccacaccctcctccaggggagaatgagaag

SEQ ID NO: 72566 - DNA, 40 bp, Homo sapiens
ttctcattctcccctggaggagggtgtgggaatcgatagt

SEQ ID NO: 72567 - DNA, 40 bp, Homo sapiens
actatcgattcccacaccctcctccaggggagaatgagaa

SEQ ID NO: 72568 - DNA, 40 bp, Homo sapiens
tctcattctcccctggaggagggtgtgggaatcgatagta

SEQ ID NO: 72569 - DNA, 40 bp, Homo sapiens
tactatcgattcccacaccctcctccaggggagaatgaga

SEQ ID NO: 72570 - DNA, 40 bp, Homo sapiens
ctcattctcccctggaggagggtgtgggaatcgatagtat

SEQ ID NO: 72571 - DNA, 40 bp, Homo sapiens
atactatcgattcccacaccctcctccaggggagaatgag

SEQ ID NO: 72572 - DNA, 40 bp, Homo sapiens
tcattctcccctggaggagggtgtgggaatcgatagtata

SEQ ID NO: 72573 - DNA, 40 bp, Homo sapiens
tatactatcgattcccacaccctcctccaggggagaatga

SEQ ID NO: 72574 - DNA, 40 bp, Homo sapiens
cattctcccctggaggagggtgtgggaatcgatagtatat

SEQ ID NO: 72575 - DNA, 40 bp, Homo sapiens
atatactatcgattcccacaccctcctccaggggagaatg

SEQ ID NO: 72576 - DNA, 40 bp, Homo sapiens
attctcccctggaggagggtgtgggaatcgatagtatata

SEQ ID NO: 72577 - DNA, 40 bp, Homo sapiens
tatatactatcgattcccacaccctcctccaggggagaat

SEQ ID NO: 72578 - DNA, 40 bp, Homo sapiens
ttctcccctggaggagggtgtgggaatcgatagtatataa

SEQ ID NO: 72579 - DNA, 40 bp, Homo sapiens
ttatatactatcgattcccacaccctcctccaggggagaa

SEQ ID NO: 72580 - DNA, 40 bp, Homo sapiens
tctcccctggaggagggtgtgggaatcgatagtatataaa

SEQ ID NO: 72581 - DNA, 40 bp, Homo sapiens
tttatatactatcgattcccacaccctcctccaggggaga

SEQ ID NO: 72582 - DNA, 40 bp, Homo sapiens
ctcccctggaggagggtgtgggaatcgatagtatataaat

SEQ ID NO: 72583 - DNA, 40 bp, Homo sapiens
atttatatactatcgattcccacaccctcctccaggggag

SEQ ID NO: 72584 - DNA, 40 bp, Homo sapiens
tcccctggaggagggtgtgggaatcgatagtatataaatc

SEQ ID NO: 72585 - DNA, 40 bp, Homo sapiens
gatttatatactatcgattcccacaccctcctccagggga

SEQ ID NO: 72586 - DNA, 40 bp, Homo sapiens
cccctggaggagggtgtgggaatcgatagtatataaatca

SEQ ID NO: 72587 - DNA, 40 bp, Homo sapiens
tgatttatatactatcgattcccacaccctcctccagggg

SEQ ID NO: 72588 - DNA, 40 bp, Homo sapiens
ccctggaggagggtgtgggaatcgatagtatataaatcac

SEQ ID NO: 72589 - DNA, 40 bp, Homo sapiens
gtgatttatatactatcgattcccacaccctcctccaggg

SEQ ID NO: 72590 - DNA, 40 bp, Homo sapiens
cctggaggagggtgtgggaatcgatagtatataaatcact

SEQ ID NO: 72591 - DNA, 40 bp, Homo sapiens
agtgatttatatactatcgattcccacaccctcctccagg

SEQ ID NO: 72592 - DNA, 40 bp, Homo sapiens
ctggaggagggtgtgggaatcgatagtatataaatcactt

SEQ ID NO: 72593 - DNA, 40 bp, Homo sapiens
aagtgatttatatactatcgattcccacaccctcctccag

SEQ ID NO: 72594 - DNA, 40 bp, Homo sapiens
tggaggagggtgtgggaatcgatagtatataaatcacttt

SEQ ID NO: 72595 - DNA, 40 bp, Homo sapiens
aaagtgatttatatactatcgattcccacaccctcctcca

SEQ ID NO: 72596 - DNA, 40 bp, Homo sapiens
ggaggagggtgtgggaatcgatagtatataaatcactttt

SEQ ID NO: 72597 - DNA, 40 bp, Homo sapiens
aaaagtgatttatatactatcgattcccacaccctcctcc

SEQ ID NO: 72598 - DNA, 40 bp, Homo sapiens
gaggagggtgtgggaatcgatagtatataaatcacttttt

SEQ ID NO: 72599 - DNA, 40 bp, Homo sapiens
aaaaagtgatttatatactatcgattcccacaccctcctc

SEQ ID NO: 72600 - DNA, 40 bp, Homo sapiens
aggagggtgtgggaatcgatagtatataaatcactttttt

SEQ ID NO: 72601 - DNA, 40 bp, Homo sapiens
aaaaaagtgatttatatactatcgattcccacaccctcct

SEQ ID NO: 72602 - DNA, 40 bp, Homo sapiens
ggagggtgtgggaatcgatagtatataaatcacttttttc

SEQ ID NO: 72603 - DNA, 40 bp, Homo sapiens
gaaaaaagtgatttatatactatcgattcccacaccctcc

SEQ ID NO: 72604 - DNA, 40 bp, Homo sapiens
gagggtgtgggaatcgatagtatataaatcacttttttcc

SEQ ID NO: 72605 - DNA, 40 bp, Homo sapiens
ggaaaaaagtgatttatatactatcgattcccacaccctc

SEQ ID NO: 72606 - DNA, 40 bp, Homo sapiens
agggtgtgggaatcgatagtatataaatcacttttttcct

SEQ ID NO: 72607 - DNA, 40 bp, Homo sapiens
aggaaaaaagtgatttatatactatcgattcccacaccct

SEQ ID NO: 72608 - DNA, 40 bp, Homo sapiens
gggtgtgggaatcgatagtatataaatcacttttttccta

SEQ ID NO: 72609 - DNA, 40 bp, Homo sapiens
taggaaaaaagtgatttatatactatcgattcccacaccc

SEQ ID NO: 72610 - DNA, 40 bp, Homo sapiens
ggtgtgggaatcgatagtatataaatcacttttttcctaa

SEQ ID NO: 72611 - DNA, 40 bp, Homo sapiens
ttaggaaaaaagtgatttatatactatcgattcccacacc

SEQ ID NO: 72612 - DNA, 40 bp, Homo sapiens
gtgtgggaatcgatagtatataaatcacttttttcctaag

SEQ ID NO: 72613 - DNA, 40 bp, Homo sapiens
cttaggaaaaaagtgatttatatactatcgattcccacac

SEQ ID NO: 72614 - DNA, 40 bp, Homo sapiens
tgtgggaatcgatagtatataaatcacttttttcctaagt

SEQ ID NO: 72615 - DNA, 40 bp, Homo sapiens
acttaggaaaaaagtgatttatatactatcgattcccaca

SEQ ID NO: 72616 - DNA, 40 bp, Homo sapiens
gtgggaatcgatagtatataaatcacttttttcctaagtc

SEQ ID NO: 72617 - DNA, 40 bp, Homo sapiens
gacttaggaaaaaagtgatttatatactatcgattcccac

SEQ ID NO: 72618 - DNA, 40 bp, Homo sapiens
tgggaatcgatagtatataaatcacttttttcctaagtca

SEQ ID NO: 72619 - DNA, 40 bp, Homo sapiens
tgacttaggaaaaaagtgatttatatactatcgattccca

SEQ ID NO: 72620 - DNA, 40 bp, Homo sapiens
gggaatcgatagtatataaatcacttttttcctaagtcaa

SEQ ID NO: 72621 - DNA, 40 bp, Homo sapiens
ttgacttaggaaaaaagtgatttatatactatcgattccc

SEQ ID NO: 72622 - DNA, 40 bp, Homo sapiens
ggaatcgatagtatataaatcacttttttcctaagtcaaa

SEQ ID NO: 72623 - DNA, 40 bp, Homo sapiens
tttgacttaggaaaaaagtgatttatatactatcgattcc

SEQ ID NO: 72624 - DNA, 40 bp, Homo sapiens
gaatcgatagtatataaatcacttttttcctaagtcaaag

SEQ ID NO: 72625 - DNA, 40 bp, Homo sapiens
ctttgacttaggaaaaaagtgatttatatactatcgattc

SEQ ID NO: 72626 - DNA, 40 bp, Homo sapiens
aatcgatagtatataaatcacttttttcctaagtcaaaga

SEQ ID NO: 72627 - DNA, 40 bp, Homo sapiens
tctttgacttaggaaaaaagtgatttatatactatcgatt

SEQ ID NO: 72628 - DNA, 40 bp, Homo sapiens
atcgatagtatataaatcacttttttcctaagtcaaagaa

SEQ ID NO: 72629 - DNA, 40 bp, Homo sapiens
ttctttgacttaggaaaaaagtgatttatatactatcgat

SEQ ID NO: 72630 - DNA, 40 bp, Homo sapiens
tcgatagtatataaatcacttttttcctaagtcaaagaag

SEQ ID NO: 72631 - DNA, 40 bp, Homo sapiens
cttctttgacttaggaaaaaagtgatttatatactatcga

SEQ ID NO: 72632 - DNA, 40 bp, Homo sapiens
cgatagtatataaatcacttttttcctaagtcaaagaagt

SEQ ID NO: 72633 - DNA, 40 bp, Homo sapiens
acttctttgacttaggaaaaaagtgatttatatactatcg

SEQ ID NO: 72634 - DNA, 40 bp, Homo sapiens
gatagtatataaatcacttttttcctaagtcaaagaagta

SEQ ID NO: 72635 - DNA, 40 bp, Homo sapiens
tacttctttgacttaggaaaaaagtgatttatatactatc

SEQ ID NO: 72636 - DNA, 40 bp, Homo sapiens
atagtatataaatcacttttttcctaagtcaaagaagtaa

SEQ ID NO: 72637 - DNA, 40 bp, Homo sapiens
ttacttctttgacttaggaaaaaagtgatttatatactat

SEQ ID NO: 72638 - DNA, 40 bp, Homo sapiens
tagtatataaatcacttttttcctaagtcaaagaagtaat

SEQ ID NO: 72639 - DNA, 40 bp, Homo sapiens
attacttctttgacttaggaaaaaagtgatttatatacta

SEQ ID NO: 72640 - DNA, 40 bp, Homo sapiens
agtatataaatcacttttttcctaagtcaaagaagtaatt

SEQ ID NO: 72641 - DNA, 40 bp, Homo sapiens
aattacttctttgacttaggaaaaaagtgatttatatact

SEQ ID NO: 72642 - DNA, 40 bp, Homo sapiens
gtatataaatcacttttttcctaagtcaaagaagtaattt

SEQ ID NO: 72643 - DNA, 40 bp, Homo sapiens
aaattacttctttgacttaggaaaaaagtgatttatatac

SEQ ID NO: 72644 - DNA, 40 bp, Homo sapiens
tatataaatcacttttttcctaagtcaaagaagtaattta

SEQ ID NO: 72645 - DNA, 40 bp, Homo sapiens
taaattacttctttgacttaggaaaaaagtgatttatata

SEQ ID NO: 72646 - DNA, 40 bp, Homo sapiens
atataaatcacttttttcctaagtcaaagaagtaatttaa

SEQ ID NO: 72647 - DNA, 40 bp, Homo sapiens
ttaaattacttctttgacttaggaaaaaagtgatttatat

SEQ ID NO: 72648 - DNA, 40 bp, Homo sapiens
tataaatcacttttttcctaagtcaaagaagtaatttaaa

SEQ ID NO: 72649 - DNA, 40 bp, Homo sapiens
tttaaattacttctttgacttaggaaaaaagtgatttata

SEQ ID NO: 72650 - DNA, 40 bp, Homo sapiens
ataaatcacttttttcctaagtcaaagaagtaatttaaag

SEQ ID NO: 72651 - DNA, 40 bp, Homo sapiens
ctttaaattacttctttgacttaggaaaaaagtgatttat

SEQ ID NO: 72652 - DNA, 40 bp, Homo sapiens
taaatcacttttttcctaagtcaaagaagtaatttaaagc

SEQ ID NO: 72653 - DNA, 40 bp, Homo sapiens
gctttaaattacttctttgacttaggaaaaaagtgattta

SEQ ID NO: 72654 - DNA, 40 bp, Homo sapiens
aaatcacttttttcctaagtcaaagaagtaatttaaagct

SEQ ID NO: 72655 - DNA, 40 bp, Homo sapiens
agctttaaattacttctttgacttaggaaaaaagtgattt

SEQ ID NO: 72656 - DNA, 40 bp, Homo sapiens
aatcacttttttcctaagtcaaagaagtaatttaaagcta

SEQ ID NO: 72657 - DNA, 40 bp, Homo sapiens
tagctttaaattacttctttgacttaggaaaaaagtgatt

SEQ ID NO: 72658 - DNA, 40 bp, Homo sapiens
atcacttttttcctaagtcaaagaagtaatttaaagctaa

SEQ ID NO: 72659 - DNA, 40 bp, Homo sapiens
ttagctttaaattacttctttgacttaggaaaaaagtgat

SEQ ID NO: 72660 - DNA, 40 bp, Homo sapiens
tcacttttttcctaagtcaaagaagtaatttaaagctaac

SEQ ID NO: 72661 - DNA, 40 bp, Homo sapiens
gttagctttaaattacttctttgacttaggaaaaaagtga

SEQ ID NO: 72662 - DNA, 40 bp, Homo sapiens
cacttttttcctaagtcaaagaagtaatttaaagctaact

SEQ ID NO: 72663 - DNA, 40 bp, Homo sapiens
agttagctttaaattacttctttgacttaggaaaaaagtg

SEQ ID NO: 72664 - DNA, 40 bp, Homo sapiens
acttttttcctaagtcaaagaagtaatttaaagctaactt

SEQ ID NO: 72665 - DNA, 40 bp, Homo sapiens
aagttagctttaaattacttctttgacttaggaaaaaagt

SEQ ID NO: 72666 - DNA, 40 bp, Homo sapiens
cttttttcctaagtcaaagaagtaatttaaagctaacttc

SEQ ID NO: 72667 - DNA, 40 bp, Homo sapiens
gaagttagctttaaattacttctttgacttaggaaaaaag

SEQ ID NO: 72668 - DNA, 40 bp, Homo sapiens
ttttttcctaagtcaaagaagtaatttaaagctaacttca

SEQ ID NO: 72669 - DNA, 40 bp, Homo sapiens
tgaagttagctttaaattacttctttgacttaggaaaaaa

SEQ ID NO: 72670 - DNA, 40 bp, Homo sapiens
tttttcctaagtcaaagaagtaatttaaagctaacttcag

SEQ ID NO: 72671 - DNA, 40 bp, Homo sapiens
ctgaagttagctttaaattacttctttgacttaggaaaaa

SEQ ID NO: 72672 - DNA, 40 bp, Homo sapiens
ttttcctaagtcaaagaagtaatttaaagctaacttcagt

SEQ ID NO: 72673 - DNA, 40 bp, Homo sapiens
actgaagttagctttaaattacttctttgacttaggaaaa

SEQ ID NO: 72674 - DNA, 40 bp, Homo sapiens
tttcctaagtcaaagaagtaatttaaagctaacttcagtt

SEQ ID NO: 72675 - DNA, 40 bp, Homo sapiens
aactgaagttagctttaaattacttctttgacttaggaaa

SEQ ID NO: 72676 - DNA, 40 bp, Homo sapiens
ttcctaagtcaaagaagtaatttaaagctaacttcagttt

SEQ ID NO: 72677 - DNA, 40 bp, Homo sapiens
aaactgaagttagctttaaattacttctttgacttaggaa

SEQ ID NO: 72678 - DNA, 40 bp, Homo sapiens
tcctaagtcaaagaagtaatttaaagctaacttcagttta

SEQ ID NO: 72679 - DNA, 40 bp, Homo sapiens
taaactgaagttagctttaaattacttctttgacttagga

SEQ ID NO: 72680 - DNA, 40 bp, Homo sapiens
cctaagtcaaagaagtaatttaaagctaacttcagtttag

SEQ ID NO: 72681 - DNA, 40 bp, Homo sapiens
ctaaactgaagttagctttaaattacttctttgacttagg

SEQ ID NO: 72682 - DNA, 40 bp, Homo sapiens
ctaagtcaaagaagtaatttaaagctaacttcagtttagg

SEQ ID NO: 72683 - DNA, 40 bp, Homo sapiens
cctaaactgaagttagctttaaattacttctttgacttag

SEQ ID NO: 72684 - DNA, 40 bp, Homo sapiens
taagtcaaagaagtaatttaaagctaacttcagtttaggc

SEQ ID NO: 72685 - DNA, 40 bp, Homo sapiens
gcctaaactgaagttagctttaaattacttctttgactta

SEQ ID NO: 72686 - DNA, 40 bp, Homo sapiens
aagtcaaagaagtaatttaaagctaacttcagtttaggct

SEQ ID NO: 72687 - DNA, 40 bp, Homo sapiens
agcctaaactgaagttagctttaaattacttctttgactt

SEQ ID NO: 72688 - DNA, 40 bp, Homo sapiens
agtcaaagaagtaatttaaagctaacttcagtttaggctt

SEQ ID NO: 72689 - DNA, 40 bp, Homo sapiens
aagcctaaactgaagttagctttaaattacttctttgact

SEQ ID NO: 72690 - DNA, 40 bp, Homo sapiens
gtcaaagaagtaatttaaagctaacttcagtttaggcttt

SEQ ID NO: 72691 - DNA, 40 bp, Homo sapiens
aaagcctaaactgaagttagctttaaattacttctttgac

SEQ ID NO: 72692 - DNA, 40 bp, Homo sapiens
tcaaagaagtaatttaaagctaacttcagtttaggcttta

SEQ ID NO: 72693 - DNA, 40 bp, Homo sapiens
taaagcctaaactgaagttagctttaaattacttctttga

SEQ ID NO: 72694 - DNA, 40 bp, Homo sapiens
caaagaagtaatttaaagctaacttcagtttaggctttaa

SEQ ID NO: 72695 - DNA, 40 bp, Homo sapiens
ttaaagcctaaactgaagttagctttaaattacttctttg

SEQ ID NO: 72696 - DNA, 40 bp, Homo sapiens
aaagaagtaatttaaagctaacttcagtttaggctttaat

SEQ ID NO: 72697 - DNA, 40 bp, Homo sapiens
attaaagcctaaactgaagttagctttaaattacttcttt

SEQ ID NO: 72698 - DNA, 40 bp, Homo sapiens
aagaagtaatttaaagctaacttcagtttaggctttaatt

SEQ ID NO: 72699 - DNA, 40 bp, Homo sapiens
aattaaagcctaaactgaagttagctttaaattacttctt

SEQ ID NO: 72700 - DNA, 40 bp, Homo sapiens
agaagtaatttaaagctaacttcagtttaggctttaattc

SEQ ID NO: 72701 - DNA, 40 bp, Homo sapiens
gaattaaagcctaaactgaagttagctttaaattacttct

SEQ ID NO: 72702 - DNA, 40 bp, Homo sapiens
gaagtaatttaaagctaacttcagtttaggctttaattcc

SEQ ID NO: 72703 - DNA, 40 bp, Homo sapiens
ggaattaaagcctaaactgaagttagctttaaattacttc

SEQ ID NO: 72704 - DNA, 40 bp, Homo sapiens
aagtaatttaaagctaacttcagtttaggctttaattcca

SEQ ID NO: 72705 - DNA, 40 bp, Homo sapiens
tggaattaaagcctaaactgaagttagctttaaattactt

SEQ ID NO: 72706 - DNA, 40 bp, Homo sapiens
agtaatttaaagctaacttcagtttaggctttaattccag

SEQ ID NO: 72707 - DNA, 40 bp, Homo sapiens
ctggaattaaagcctaaactgaagttagctttaaattact

SEQ ID NO: 72708 - DNA, 40 bp, Homo sapiens
gtaatttaaagctaacttcagtttaggctttaattccagg

SEQ ID NO: 72709 - DNA, 40 bp, Homo sapiens
cctggaattaaagcctaaactgaagttagctttaaattac

SEQ ID NO: 72710 - DNA, 40 bp, Homo sapiens
taatttaaagctaacttcagtttaggctttaattccagga

SEQ ID NO: 72711 - DNA, 40 bp, Homo sapiens
tcctggaattaaagcctaaactgaagttagctttaaatta

SEQ ID NO: 72712 - DNA, 40 bp, Homo sapiens
aatttaaagctaacttcagtttaggctttaattccaggac

SEQ ID NO: 72713 - DNA, 40 bp, Homo sapiens
gtcctggaattaaagcctaaactgaagttagctttaaatt

SEQ ID NO: 72714 - DNA, 40 bp, Homo sapiens
atttaaagctaacttcagtttaggctttaattccaggact

SEQ ID NO: 72715 - DNA, 40 bp, Homo sapiens
agtcctggaattaaagcctaaactgaagttagctttaaat

SEQ ID NO: 72716 - DNA, 40 bp, Homo sapiens
tttaaagctaacttcagtttaggctttaattccaggacta

SEQ ID NO: 72717 - DNA, 40 bp, Homo sapiens
tagtcctggaattaaagcctaaactgaagttagctttaaa

SEQ ID NO: 72718 - DNA, 40 bp, Homo sapiens
ttaaagctaacttcagtttaggctttaattccaggactag

SEQ ID NO: 72719 - DNA, 40 bp, Homo sapiens
ctagtcctggaattaaagcctaaactgaagttagctttaa

SEQ ID NO: 72720 - DNA, 40 bp, Homo sapiens
taaagctaacttcagtttaggctttaattccaggactagc

SEQ ID NO: 72721 - DNA, 40 bp, Homo sapiens
gctagtcctggaattaaagcctaaactgaagttagcttta

SEQ ID NO: 72722 - DNA, 40 bp, Homo sapiens
aaagctaacttcagtttaggctttaattccaggactagca

SEQ ID NO: 72723 - DNA, 40 bp, Homo sapiens
tgctagtcctggaattaaagcctaaactgaagttagcttt

SEQ ID NO: 72724 - DNA, 40 bp, Homo sapiens
aagctaacttcagtttaggctttaattccaggactagcaa

SEQ ID NO: 72725 - DNA, 40 bp, Homo sapiens
ttgctagtcctggaattaaagcctaaactgaagttagctt

SEQ ID NO: 72726 - DNA, 40 bp, Homo sapiens
agctaacttcagtttaggctttaattccaggactagcaaa

SEQ ID NO: 72727 - DNA, 40 bp, Homo sapiens
tttgctagtcctggaattaaagcctaaactgaagttagct

SEQ ID NO: 72728 - DNA, 40 bp, Homo sapiens
gctaacttcagtttaggctttaattccaggactagcaaac

SEQ ID NO: 72729 - DNA, 40 bp, Homo sapiens
gtttgctagtcctggaattaaagcctaaactgaagttagc

SEQ ID NO: 72730 - DNA, 40 bp, Homo sapiens
ctaacttcagtttaggctttaattccaggactagcaaact

SEQ ID NO: 72731 - DNA, 40 bp, Homo sapiens
agtttgctagtcctggaattaaagcctaaactgaagttag

SEQ ID NO: 72732 - DNA, 40 bp, Homo sapiens
taacttcagtttaggctttaattccaggactagcaaacta

SEQ ID NO: 72733 - DNA, 40 bp, Homo sapiens
tagtttgctagtcctggaattaaagcctaaactgaagtta

SEQ ID NO: 72734 - DNA, 40 bp, Homo sapiens
aacttcagtttaggctttaattccaggactagcaaactaa

SEQ ID NO: 72735 - DNA, 40 bp, Homo sapiens
ttagtttgctagtcctggaattaaagcctaaactgaagtt

SEQ ID NO: 72736 - DNA, 40 bp, Homo sapiens
acttcagtttaggctttaattccaggactagcaaactaaa

SEQ ID NO: 72737 - DNA, 40 bp, Homo sapiens
tttagtttgctagtcctggaattaaagcctaaactgaagt

SEQ ID NO: 72738 - DNA, 40 bp, Homo sapiens
cttcagtttaggctttaattccaggactagcaaactaaaa

SEQ ID NO: 72739 - DNA, 40 bp, Homo sapiens
ttttagtttgctagtcctggaattaaagcctaaactgaag

SEQ ID NO: 72740 - DNA, 40 bp, Homo sapiens
ttcagtttaggctttaattccaggactagcaaactaaaat

SEQ ID NO: 72741 - DNA, 40 bp, Homo sapiens
attttagtttgctagtcctggaattaaagcctaaactgaa

SEQ ID NO: 72742 - DNA, 40 bp, Homo sapiens
tcagtttaggctttaattccaggactagcaaactaaaatg

SEQ ID NO: 72743 - DNA, 40 bp, Homo sapiens
cattttagtttgctagtcctggaattaaagcctaaactga

SEQ ID NO: 72744 - DNA, 40 bp, Homo sapiens
cagtttaggctttaattccaggactagcaaactaaaatgg

SEQ ID NO: 72745 - DNA, 40 bp, Homo sapiens
ccattttagtttgctagtcctggaattaaagcctaaactg

SEQ ID NO: 72746 - DNA, 40 bp, Homo sapiens
agtttaggctttaattccaggactagcaaactaaaatggt

SEQ ID NO: 72747 - DNA, 40 bp, Homo sapiens
accattttagtttgctagtcctggaattaaagcctaaact

SEQ ID NO: 72748 - DNA, 40 bp, Homo sapiens
gtttaggctttaattccaggactagcaaactaaaatggtt

SEQ ID NO: 72749 - DNA, 40 bp, Homo sapiens
aaccattttagtttgctagtcctggaattaaagcctaaac

SEQ ID NO: 72750 - DNA, 40 bp, Homo sapiens
tttaggctttaattccaggactagcaaactaaaatggttg

SEQ ID NO: 72751 - DNA, 40 bp, Homo sapiens
caaccattttagtttgctagtcctggaattaaagcctaaa

SEQ ID NO: 72752 - DNA, 40 bp, Homo sapiens
ttaggctttaattccaggactagcaaactaaaatggttgc

SEQ ID NO: 72753 - DNA, 40 bp, Homo sapiens
gcaaccattttagtttgctagtcctggaattaaagcctaa

SEQ ID NO: 72754 - DNA, 40 bp, Homo sapiens
taggctttaattccaggactagcaaactaaaatggttgca

SEQ ID NO: 72755 - DNA, 40 bp, Homo sapiens
tgcaaccattttagtttgctagtcctggaattaaagccta

SEQ ID NO: 72756 - DNA, 40 bp, Homo sapiens
aggctttaattccaggactagcaaactaaaatggttgcat

SEQ ID NO: 72757 - DNA, 40 bp, Homo sapiens
atgcaaccattttagtttgctagtcctggaattaaagcct

SEQ ID NO: 72758 - DNA, 40 bp, Homo sapiens
ggctttaattccaggactagcaaactaaaatggttgcatt

SEQ ID NO: 72759 - DNA, 40 bp, Homo sapiens
aatgcaaccattttagtttgctagtcctggaattaaagcc

SEQ ID NO: 72760 - DNA, 40 bp, Homo sapiens
gctttaattccaggactagcaaactaaaatggttgcatta

SEQ ID NO: 72761 - DNA, 40 bp, Homo sapiens
taatgcaaccattttagtttgctagtcctggaattaaagc

SEQ ID NO: 72762 - DNA, 40 bp, Homo sapiens
ctttaattccaggactagcaaactaaaatggttgcattaa

SEQ ID NO: 72763 - DNA, 40 bp, Homo sapiens
ttaatgcaaccattttagtttgctagtcctggaattaaag

SEQ ID NO: 72764 - DNA, 40 bp, Homo sapiens
tttaattccaggactagcaaactaaaatggttgcattaat

SEQ ID NO: 72765 - DNA, 40 bp, Homo sapiens
attaatgcaaccattttagtttgctagtcctggaattaaa

SEQ ID NO: 72766 - DNA, 40 bp, Homo sapiens
ttaattccaggactagcaaactaaaatggttgcattaatt

SEQ ID NO: 72767 - DNA, 40 bp, Homo sapiens
aattaatgcaaccattttagtttgctagtcctggaattaa

SEQ ID NO: 72768 - DNA, 40 bp, Homo sapiens
taattccaggactagcaaactaaaatggttgcattaattg

SEQ ID NO: 72769 - DNA, 40 bp, Homo sapiens
caattaatgcaaccattttagtttgctagtcctggaatta

SEQ ID NO: 72770 - DNA, 40 bp, Homo sapiens
aattccaggactagcaaactaaaatggttgcattaattga

SEQ ID NO: 72771 - DNA, 40 bp, Homo sapiens
tcaattaatgcaaccattttagtttgctagtcctggaatt

SEQ ID NO: 72772 - DNA, 40 bp, Homo sapiens
attccaggactagcaaactaaaatggttgcattaattgac

SEQ ID NO: 72773 - DNA, 40 bp, Homo sapiens
gtcaattaatgcaaccattttagtttgctagtcctggaat

SEQ ID NO: 72774 - DNA, 40 bp, Homo sapiens
ttccaggactagcaaactaaaatggttgcattaattgaca

SEQ ID NO: 72775 - DNA, 40 bp, Homo sapiens
tgtcaattaatgcaaccattttagtttgctagtcctggaa

SEQ ID NO: 72776 - DNA, 40 bp, Homo sapiens
tccaggactagcaaactaaaatggttgcattaattgacaa

SEQ ID NO: 72777 - DNA, 40 bp, Homo sapiens
ttgtcaattaatgcaaccattttagtttgctagtcctgga

SEQ ID NO: 72778 - DNA, 40 bp, Homo sapiens
ccaggactagcaaactaaaatggttgcattaattgacaaa

SEQ ID NO: 72779 - DNA, 40 bp, Homo sapiens
tttgtcaattaatgcaaccattttagtttgctagtcctgg

SEQ ID NO: 72780 - DNA, 40 bp, Homo sapiens
caggactagcaaactaaaatggttgcattaattgacaaac

SEQ ID NO: 72781 - DNA, 40 bp, Homo sapiens
gtttgtcaattaatgcaaccattttagtttgctagtcctg

SEQ ID NO: 72782 - DNA, 40 bp, Homo sapiens
aggactagcaaactaaaatggttgcattaattgacaaaca

SEQ ID NO: 72783 - DNA, 40 bp, Homo sapiens
tgtttgtcaattaatgcaaccattttagtttgctagtcct

SEQ ID NO: 72784 - DNA, 40 bp, Homo sapiens
ggactagcaaactaaaatggttgcattaattgacaaacag

SEQ ID NO: 72785 - DNA, 40 bp, Homo sapiens
ctgtttgtcaattaatgcaaccattttagtttgctagtcc

SEQ ID NO: 72786 - DNA, 40 bp, Homo sapiens
gactagcaaactaaaatggttgcattaattgacaaacaga

SEQ ID NO: 72787 - DNA, 40 bp, Homo sapiens
tctgtttgtcaattaatgcaaccattttagtttgctagtc

SEQ ID NO: 72788 - DNA, 40 bp, Homo sapiens
actagcaaactaaaatggttgcattaattgacaaacagat

SEQ ID NO: 72789 - DNA, 40 bp, Homo sapiens
atctgtttgtcaattaatgcaaccattttagtttgctagt

SEQ ID NO: 72790 - DNA, 40 bp, Homo sapiens
ctagcaaactaaaatggttgcattaattgacaaacagatg

SEQ ID NO: 72791 - DNA, 40 bp, Homo sapiens
catctgtttgtcaattaatgcaaccattttagtttgctag

SEQ ID NO: 72792 - DNA, 40 bp, Homo sapiens
tagcaaactaaaatggttgcattaattgacaaacagatgc

SEQ ID NO: 72793 - DNA, 40 bp, Homo sapiens
gcatctgtttgtcaattaatgcaaccattttagtttgcta

SEQ ID NO: 72794 - DNA, 40 bp, Homo sapiens
agcaaactaaaatggttgcattaattgacaaacagatgct

SEQ ID NO: 72795 - DNA, 40 bp, Homo sapiens
agcatctgtttgtcaattaatgcaaccattttagtttgct

SEQ ID NO: 72796 - DNA, 40 bp, Homo sapiens
gcaaactaaaatggttgcattaattgacaaacagatgcta

SEQ ID NO: 72797 - DNA, 40 bp, Homo sapiens
tagcatctgtttgtcaattaatgcaaccattttagtttgc

SEQ ID NO: 72798 - DNA, 40 bp, Homo sapiens
caaactaaaatggttgcattaattgacaaacagatgctaa

SEQ ID NO: 72799 - DNA, 40 bp, Homo sapiens
ttagcatctgtttgtcaattaatgcaaccattttagtttg

SEQ ID NO: 72800 - DNA, 40 bp, Homo sapiens
aaactaaaatggttgcattaattgacaaacagatgctaat

SEQ ID NO: 72801 - DNA, 40 bp, Homo sapiens
attagcatctgtttgtcaattaatgcaaccattttagttt

SEQ ID NO: 72802 - DNA, 40 bp, Homo sapiens
aactaaaatggttgcattaattgacaaacagatgctaata

SEQ ID NO: 72803 - DNA, 40 bp, Homo sapiens
tattagcatctgtttgtcaattaatgcaaccattttagtt

SEQ ID NO: 72804 - DNA, 40 bp, Homo sapiens
actaaaatggttgcattaattgacaaacagatgctaatac

SEQ ID NO: 72805 - DNA, 40 bp, Homo sapiens
gtattagcatctgtttgtcaattaatgcaaccattttagt

SEQ ID NO: 72806 - DNA, 40 bp, Homo sapiens
ctaaaatggttgcattaattgacaaacagatgctaatacc

SEQ ID NO: 72807 - DNA, 40 bp, Homo sapiens
ggtattagcatctgtttgtcaattaatgcaaccattttag

SEQ ID NO: 72808 - DNA, 40 bp, Homo sapiens
taaaatggttgcattaattgacaaacagatgctaatacct

SEQ ID NO: 72809 - DNA, 40 bp, Homo sapiens
aggtattagcatctgtttgtcaattaatgcaaccatttta

SEQ ID NO: 72810 - DNA, 40 bp, Homo sapiens
aaaatggttgcattaattgacaaacagatgctaatacctg

SEQ ID NO: 72811 - DNA, 40 bp, Homo sapiens
caggtattagcatctgtttgtcaattaatgcaaccatttt

SEQ ID NO: 72812 - DNA, 40 bp, Homo sapiens
aaatggttgcattaattgacaaacagatgctaatacctgt

SEQ ID NO: 72813 - DNA, 40 bp, Homo sapiens
acaggtattagcatctgtttgtcaattaatgcaaccattt

SEQ ID NO: 72814 - DNA, 40 bp, Homo sapiens
aatggttgcattaattgacaaacagatgctaatacctgtg

SEQ ID NO: 72815 - DNA, 40 bp, Homo sapiens
cacaggtattagcatctgtttgtcaattaatgcaaccatt

SEQ ID NO: 72816 - DNA, 40 bp, Homo sapiens
atggttgcattaattgacaaacagatgctaatacctgtgt

SEQ ID NO: 72817 - DNA, 40 bp, Homo sapiens
acacaggtattagcatctgtttgtcaattaatgcaaccat

SEQ ID NO: 72818 - DNA, 40 bp, Homo sapiens
tggttgcattaattgacaaacagatgctaatacctgtgtt

SEQ ID NO: 72819 - DNA, 40 bp, Homo sapiens
aacacaggtattagcatctgtttgtcaattaatgcaacca

SEQ ID NO: 72820 - DNA, 40 bp, Homo sapiens
ggttgcattaattgacaaacagatgctaatacctgtgttt

SEQ ID NO: 72821 - DNA, 40 bp, Homo sapiens
aaacacaggtattagcatctgtttgtcaattaatgcaacc

SEQ ID NO: 72822 - DNA, 40 bp, Homo sapiens
gttgcattaattgacaaacagatgctaatacctgtgttta

SEQ ID NO: 72823 - DNA, 40 bp, Homo sapiens
taaacacaggtattagcatctgtttgtcaattaatgcaac

SEQ ID NO: 72824 - DNA, 40 bp, Homo sapiens
ttgcattaattgacaaacagatgctaatacctgtgtttag

SEQ ID NO: 72825 - DNA, 40 bp, Homo sapiens
ctaaacacaggtattagcatctgtttgtcaattaatgcaa

SEQ ID NO: 72826 - DNA, 40 bp, Homo sapiens
tgcattaattgacaaacagatgctaatacctgtgtttagg

SEQ ID NO: 72827 - DNA, 40 bp, Homo sapiens
cctaaacacaggtattagcatctgtttgtcaattaatgca

SEQ ID NO: 72828 - DNA, 40 bp, Homo sapiens
gcattaattgacaaacagatgctaatacctgtgtttaggc

SEQ ID NO: 72829 - DNA, 40 bp, Homo sapiens
gcctaaacacaggtattagcatctgtttgtcaattaatgc

SEQ ID NO: 72830 - DNA, 40 bp, Homo sapiens
cattaattgacaaacagatgctaatacctgtgtttaggct

SEQ ID NO: 72831 - DNA, 40 bp, Homo sapiens
agcctaaacacaggtattagcatctgtttgtcaattaatg

SEQ ID NO: 72832 - DNA, 40 bp, Homo sapiens
attaattgacaaacagatgctaatacctgtgtttaggctt

SEQ ID NO: 72833 - DNA, 40 bp, Homo sapiens
aagcctaaacacaggtattagcatctgtttgtcaattaat

SEQ ID NO: 72834 - DNA, 40 bp, Homo sapiens
ttaattgacaaacagatgctaatacctgtgtttaggcttg

SEQ ID NO: 72835 - DNA, 40 bp, Homo sapiens
caagcctaaacacaggtattagcatctgtttgtcaattaa

SEQ ID NO: 72836 - DNA, 40 bp, Homo sapiens
taattgacaaacagatgctaatacctgtgtttaggcttgt

SEQ ID NO: 72837 - DNA, 40 bp, Homo sapiens
acaagcctaaacacaggtattagcatctgtttgtcaatta

SEQ ID NO: 72838 - DNA, 40 bp, Homo sapiens
aattgacaaacagatgctaatacctgtgtttaggcttgtc

SEQ ID NO: 72839 - DNA, 40 bp, Homo sapiens
gacaagcctaaacacaggtattagcatctgtttgtcaatt

SEQ ID NO: 72840 - DNA, 40 bp, Homo sapiens
attgacaaacagatgctaatacctgtgtttaggcttgtca

SEQ ID NO: 72841 - DNA, 40 bp, Homo sapiens
tgacaagcctaaacacaggtattagcatctgtttgtcaat

SEQ ID NO: 72842 - DNA, 40 bp, Homo sapiens
ttgacaaacagatgctaatacctgtgtttaggcttgtcat

SEQ ID NO: 72843 - DNA, 40 bp, Homo sapiens
atgacaagcctaaacacaggtattagcatctgtttgtcaa

SEQ ID NO: 72844 - DNA, 40 bp, Homo sapiens
tgacaaacagatgctaatacctgtgtttaggcttgtcata

SEQ ID NO: 72845 - DNA, 40 bp, Homo sapiens
tatgacaagcctaaacacaggtattagcatctgtttgtca

SEQ ID NO: 72846 - DNA, 40 bp, Homo sapiens
gacaaacagatgctaatacctgtgtttaggcttgtcataa

SEQ ID NO: 72847 - DNA, 40 bp, Homo sapiens
ttatgacaagcctaaacacaggtattagcatctgtttgtc

SEQ ID NO: 72848 - DNA, 40 bp, Homo sapiens
acaaacagatgctaatacctgtgtttaggcttgtcataat

SEQ ID NO: 72849 - DNA, 40 bp, Homo sapiens
attatgacaagcctaaacacaggtattagcatctgtttgt

SEQ ID NO: 72850 - DNA, 40 bp, Homo sapiens
caaacagatgctaatacctgtgtttaggcttgtcataatc

SEQ ID NO: 72851 - DNA, 40 bp, Homo sapiens
gattatgacaagcctaaacacaggtattagcatctgtttg

SEQ ID NO: 72852 - DNA, 40 bp, Homo sapiens
aaacagatgctaatacctgtgtttaggcttgtcataatct

SEQ ID NO: 72853 - DNA, 40 bp, Homo sapiens
agattatgacaagcctaaacacaggtattagcatctgttt

SEQ ID NO: 72854 - DNA, 40 bp, Homo sapiens
aacagatgctaatacctgtgtttaggcttgtcataatctc

SEQ ID NO: 72855 - DNA, 40 bp, Homo sapiens
gagattatgacaagcctaaacacaggtattagcatctgtt

SEQ ID NO: 72856 - DNA, 40 bp, Homo sapiens
acagatgctaatacctgtgtttaggcttgtcataatctct

SEQ ID NO: 72857 - DNA, 40 bp, Homo sapiens
agagattatgacaagcctaaacacaggtattagcatctgt

SEQ ID NO: 72858 - DNA, 40 bp, Homo sapiens
cagatgctaatacctgtgtttaggcttgtcataatctctc

SEQ ID NO: 72859 - DNA, 40 bp, Homo sapiens
gagagattatgacaagcctaaacacaggtattagcatctg

SEQ ID NO: 72860 - DNA, 40 bp, Homo sapiens
agatgctaatacctgtgtttaggcttgtcataatctctcc

SEQ ID NO: 72861 - DNA, 40 bp, Homo sapiens
ggagagattatgacaagcctaaacacaggtattagcatct

SEQ ID NO: 72862 - DNA, 40 bp, Homo sapiens
gatgctaatacctgtgtttaggcttgtcataatctctcct

SEQ ID NO: 72863 - DNA, 40 bp, Homo sapiens
aggagagattatgacaagcctaaacacaggtattagcatc

SEQ ID NO: 72864 - DNA, 40 bp, Homo sapiens
atgctaatacctgtgtttaggcttgtcataatctctccta

SEQ ID NO: 72865 - DNA, 40 bp, Homo sapiens
taggagagattatgacaagcctaaacacaggtattagcat

SEQ ID NO: 72866 - DNA, 40 bp, Homo sapiens
tgctaatacctgtgtttaggcttgtcataatctctcctaa

SEQ ID NO: 72867 - DNA, 40 bp, Homo sapiens
ttaggagagattatgacaagcctaaacacaggtattagca

SEQ ID NO: 72868 - DNA, 40 bp, Homo sapiens
gctaatacctgtgtttaggcttgtcataatctctcctaat

SEQ ID NO: 72869 - DNA, 40 bp, Homo sapiens
attaggagagattatgacaagcctaaacacaggtattagc

SEQ ID NO: 72870 - DNA, 40 bp, Homo sapiens
ctaatacctgtgtttaggcttgtcataatctctcctaatt

SEQ ID NO: 72871 - DNA, 40 bp, Homo sapiens
aattaggagagattatgacaagcctaaacacaggtattag

SEQ ID NO: 72872 - DNA, 40 bp, Homo sapiens
taatacctgtgtttaggcttgtcataatctctcctaattc

SEQ ID NO: 72873 - DNA, 40 bp, Homo sapiens
gaattaggagagattatgacaagcctaaacacaggtatta

SEQ ID NO: 72874 - DNA, 40 bp, Homo sapiens
aatacctgtgtttaggcttgtcataatctctcctaattcc

SEQ ID NO: 72875 - DNA, 40 bp, Homo sapiens
ggaattaggagagattatgacaagcctaaacacaggtatt

SEQ ID NO: 72876 - DNA, 40 bp, Homo sapiens
atacctgtgtttaggcttgtcataatctctcctaattcct

SEQ ID NO: 72877 - DNA, 40 bp, Homo sapiens
aggaattaggagagattatgacaagcctaaacacaggtat

SEQ ID NO: 72878 - DNA, 40 bp, Homo sapiens
tacctgtgtttaggcttgtcataatctctcctaattccta

SEQ ID NO: 72879 - DNA, 40 bp, Homo sapiens
taggaattaggagagattatgacaagcctaaacacaggta

SEQ ID NO: 72880 - DNA, 40 bp, Homo sapiens
acctgtgtttaggcttgtcataatctctcctaattcctaa

SEQ ID NO: 72881 - DNA, 40 bp, Homo sapiens
ttaggaattaggagagattatgacaagcctaaacacaggt

SEQ ID NO: 72882 - DNA, 40 bp, Homo sapiens
cctgtgtttaggcttgtcataatctctcctaattcctaat

SEQ ID NO: 72883 - DNA, 40 bp, Homo sapiens
attaggaattaggagagattatgacaagcctaaacacagg

SEQ ID NO: 72884 - DNA, 40 bp, Homo sapiens
ctgtgtttaggcttgtcataatctctcctaattcctaatt

SEQ ID NO: 72885 - DNA, 40 bp, Homo sapiens
aattaggaattaggagagattatgacaagcctaaacacag

SEQ ID NO: 72886 - DNA, 40 bp, Homo sapiens
tgtgtttaggcttgtcataatctctcctaattcctaattt

SEQ ID NO: 72887 - DNA, 40 bp, Homo sapiens
aaattaggaattaggagagattatgacaagcctaaacaca

SEQ ID NO: 72888 - DNA, 40 bp, Homo sapiens
gtgtttaggcttgtcataatctctcctaattcctaattta

SEQ ID NO: 72889 - DNA, 40 bp, Homo sapiens
taaattaggaattaggagagattatgacaagcctaaacac

SEQ ID NO: 72890 - DNA, 40 bp, Homo sapiens
tgtttaggcttgtcataatctctcctaattcctaatttaa

SEQ ID NO: 72891 - DNA, 40 bp, Homo sapiens
ttaaattaggaattaggagagattatgacaagcctaaaca

SEQ ID NO: 72892 - DNA, 40 bp, Homo sapiens
gtttaggcttgtcataatctctcctaattcctaatttaaa

SEQ ID NO: 72893 - DNA, 40 bp, Homo sapiens
tttaaattaggaattaggagagattatgacaagcctaaac

SEQ ID NO: 72894 - DNA, 40 bp, Homo sapiens
tttaggcttgtcataatctctcctaattcctaatttaaaa

SEQ ID NO: 72895 - DNA, 40 bp, Homo sapiens
ttttaaattaggaattaggagagattatgacaagcctaaa

SEQ ID NO: 72896 - DNA, 40 bp, Homo sapiens
ttaggcttgtcataatctctcctaattcctaatttaaaaa

SEQ ID NO: 72897 - DNA, 40 bp, Homo sapiens
tttttaaattaggaattaggagagattatgacaagcctaa

SEQ ID NO: 72898 - DNA, 40 bp, Homo sapiens
taggcttgtcataatctctcctaattcctaatttaaaaat

SEQ ID NO: 72899 - DNA, 40 bp, Homo sapiens
atttttaaattaggaattaggagagattatgacaagccta

SEQ ID NO: 72900 - DNA, 40 bp, Homo sapiens
aggcttgtcataatctctcctaattcctaatttaaaaatt

SEQ ID NO: 72901 - DNA, 40 bp, Homo sapiens
aatttttaaattaggaattaggagagattatgacaagcct

SEQ ID NO: 72902 - DNA, 40 bp, Homo sapiens
ggcttgtcataatctctcctaattcctaatttaaaaattt

SEQ ID NO: 72903 - DNA, 40 bp, Homo sapiens
aaatttttaaattaggaattaggagagattatgacaagcc

SEQ ID NO: 72904 - DNA, 40 bp, Homo sapiens
gcttgtcataatctctcctaattcctaatttaaaaatttt

SEQ ID NO: 72905 - DNA, 40 bp, Homo sapiens
aaaatttttaaattaggaattaggagagattatgacaagc

SEQ ID NO: 72906 - DNA, 40 bp, Homo sapiens
cttgtcataatctctcctaattcctaatttaaaaatttta

SEQ ID NO: 72907 - DNA, 40 bp, Homo sapiens
taaaatttttaaattaggaattaggagagattatgacaag

SEQ ID NO: 72908 - DNA, 40 bp, Homo sapiens
ttgtcataatctctcctaattcctaatttaaaaattttaa

SEQ ID NO: 72909 - DNA, 40 bp, Homo sapiens
ttaaaatttttaaattaggaattaggagagattatgacaa

SEQ ID NO: 72910 - DNA, 40 bp, Homo sapiens
tgtcataatctctcctaattcctaatttaaaaattttaaa

SEQ ID NO: 72911 - DNA, 40 bp, Homo sapiens
tttaaaatttttaaattaggaattaggagagattatgaca

SEQ ID NO: 72912 - DNA, 40 bp, Homo sapiens
gtcataatctctcctaattcctaatttaaaaattttaaaa

SEQ ID NO: 72913 - DNA, 40 bp, Homo sapiens
ttttaaaatttttaaattaggaattaggagagattatgac

SEQ ID NO: 72914 - DNA, 40 bp, Homo sapiens
tcataatctctcctaattcctaatttaaaaattttaaaat

SEQ ID NO: 72915 - DNA, 40 bp, Homo sapiens
attttaaaatttttaaattaggaattaggagagattatga

SEQ ID NO: 72916 - DNA, 40 bp, Homo sapiens
cataatctctcctaattcctaatttaaaaattttaaaatt

SEQ ID NO: 72917 - DNA, 40 bp, Homo sapiens
aattttaaaatttttaaattaggaattaggagagattatg

SEQ ID NO: 72918 - DNA, 40 bp, Homo sapiens
ataatctctcctaattcctaatttaaaaattttaaaattt

SEQ ID NO: 72919 - DNA, 40 bp, Homo sapiens
aaattttaaaatttttaaattaggaattaggagagattat

SEQ ID NO: 72920 - DNA, 40 bp, Homo sapiens
taatctctcctaattcctaatttaaaaattttaaaattta

SEQ ID NO: 72921 - DNA, 40 bp, Homo sapiens
taaattttaaaatttttaaattaggaattaggagagatta

SEQ ID NO: 72922 - DNA, 40 bp, Homo sapiens
aatctctcctaattcctaatttaaaaattttaaaatttaa

SEQ ID NO: 72923 - DNA, 40 bp, Homo sapiens
ttaaattttaaaatttttaaattaggaattaggagagatt

SEQ ID NO: 72924 - DNA, 40 bp, Homo sapiens
atctctcctaattcctaatttaaaaattttaaaatttaat

SEQ ID NO: 72925 - DNA, 40 bp, Homo sapiens
attaaattttaaaatttttaaattaggaattaggagagat

SEQ ID NO: 72926 - DNA, 40 bp, Homo sapiens
tctctcctaattcctaatttaaaaattttaaaatttaatt

SEQ ID NO: 72927 - DNA, 40 bp, Homo sapiens
aattaaattttaaaatttttaaattaggaattaggagaga

SEQ ID NO: 72928 - DNA, 40 bp, Homo sapiens
ctctcctaattcctaatttaaaaattttaaaatttaattc

SEQ ID NO: 72929 - DNA, 40 bp, Homo sapiens
gaattaaattttaaaatttttaaattaggaattaggagag

SEQ ID NO: 72930 - DNA, 40 bp, Homo sapiens
tctcctaattcctaatttaaaaattttaaaatttaattcc

SEQ ID NO: 72931 - DNA, 40 bp, Homo sapiens
ggaattaaattttaaaatttttaaattaggaattaggaga

SEQ ID NO: 72932 - DNA, 40 bp, Homo sapiens
ctcctaattcctaatttaaaaattttaaaatttaattcca

SEQ ID NO: 72933 - DNA, 40 bp, Homo sapiens
tggaattaaattttaaaatttttaaattaggaattaggag

SEQ ID NO: 72934 - DNA, 40 bp, Homo sapiens
tcctaattcctaatttaaaaattttaaaatttaattccat

SEQ ID NO: 72935 - DNA, 40 bp, Homo sapiens
atggaattaaattttaaaatttttaaattaggaattagga

SEQ ID NO: 72936 - DNA, 40 bp, Homo sapiens
cctaattcctaatttaaaaattttaaaatttaattccatt

SEQ ID NO: 72937 - DNA, 40 bp, Homo sapiens
aatggaattaaattttaaaatttttaaattaggaattagg

SEQ ID NO: 72938 - DNA, 40 bp, Homo sapiens
ctaattcctaatttaaaaattttaaaatttaattccatta

SEQ ID NO: 72939 - DNA, 40 bp, Homo sapiens
taatggaattaaattttaaaatttttaaattaggaattag

SEQ ID NO: 72940 - DNA, 40 bp, Homo sapiens
taattcctaatttaaaaattttaaaatttaattccattag

SEQ ID NO: 72941 - DNA, 40 bp, Homo sapiens
ctaatggaattaaattttaaaatttttaaattaggaatta

SEQ ID NO: 72942 - DNA, 40 bp, Homo sapiens
aattcctaatttaaaaattttaaaatttaattccattaga

SEQ ID NO: 72943 - DNA, 40 bp, Homo sapiens
tctaatggaattaaattttaaaatttttaaattaggaatt

SEQ ID NO: 72944 - DNA, 40 bp, Homo sapiens
attcctaatttaaaaattttaaaatttaattccattagaa

SEQ ID NO: 72945 - DNA, 40 bp, Homo sapiens
ttctaatggaattaaattttaaaatttttaaattaggaat

SEQ ID NO: 72946 - DNA, 40 bp, Homo sapiens
ttcctaatttaaaaattttaaaatttaattccattagaaa

SEQ ID NO: 72947 - DNA, 40 bp, Homo sapiens
tttctaatggaattaaattttaaaatttttaaattaggaa

SEQ ID NO: 72948 - DNA, 40 bp, Homo sapiens
tcctaatttaaaaattttaaaatttaattccattagaaaa

SEQ ID NO: 72949 - DNA, 40 bp, Homo sapiens
ttttctaatggaattaaattttaaaatttttaaattagga

SEQ ID NO: 72950 - DNA, 40 bp, Homo sapiens
cctaatttaaaaattttaaaatttaattccattagaaaac

SEQ ID NO: 72951 - DNA, 40 bp, Homo sapiens
gttttctaatggaattaaattttaaaatttttaaattagg

SEQ ID NO: 72952 - DNA, 40 bp, Homo sapiens
ctaatttaaaaattttaaaatttaattccattagaaaaca

SEQ ID NO: 72953 - DNA, 40 bp, Homo sapiens
tgttttctaatggaattaaattttaaaatttttaaattag

SEQ ID NO: 72954 - DNA, 40 bp, Homo sapiens
taatttaaaaattttaaaatttaattccattagaaaacaa

SEQ ID NO: 72955 - DNA, 40 bp, Homo sapiens
ttgttttctaatggaattaaattttaaaatttttaaatta

SEQ ID NO: 72956 - DNA, 40 bp, Homo sapiens
aatttaaaaattttaaaatttaattccattagaaaacaaa

SEQ ID NO: 72957 - DNA, 40 bp, Homo sapiens
tttgttttctaatggaattaaattttaaaatttttaaatt

SEQ ID NO: 72958 - DNA, 40 bp, Homo sapiens
atttaaaaattttaaaatttaattccattagaaaacaaaa

SEQ ID NO: 72959 - DNA, 40 bp, Homo sapiens
ttttgttttctaatggaattaaattttaaaatttttaaat

SEQ ID NO: 72960 - DNA, 40 bp, Homo sapiens
tttaaaaattttaaaatttaattccattagaaaacaaaac

SEQ ID NO: 72961 - DNA, 40 bp, Homo sapiens
gttttgttttctaatggaattaaattttaaaatttttaaa

SEQ ID NO: 72962 - DNA, 40 bp, Homo sapiens
ttaaaaattttaaaatttaattccattagaaaacaaaact

SEQ ID NO: 72963 - DNA, 40 bp, Homo sapiens
agttttgttttctaatggaattaaattttaaaatttttaa

SEQ ID NO: 72964 - DNA, 40 bp, Homo sapiens
taaaaattttaaaatttaattccattagaaaacaaaactg

SEQ ID NO: 72965 - DNA, 40 bp, Homo sapiens
cagttttgttttctaatggaattaaattttaaaattttta

SEQ ID NO: 72966 - DNA, 40 bp, Homo sapiens
aaaaattttaaaatttaattccattagaaaacaaaactga

SEQ ID NO: 72967 - DNA, 40 bp, Homo sapiens
tcagttttgttttctaatggaattaaattttaaaattttt

SEQ ID NO: 72968 - DNA, 40 bp, Homo sapiens
aaaattttaaaatttaattccattagaaaacaaaactgac

SEQ ID NO: 72969 - DNA, 40 bp, Homo sapiens
gtcagttttgttttctaatggaattaaattttaaaatttt

SEQ ID NO: 72970 - DNA, 40 bp, Homo sapiens
aaattttaaaatttaattccattagaaaacaaaactgact

SEQ ID NO: 72971 - DNA, 40 bp, Homo sapiens
agtcagttttgttttctaatggaattaaattttaaaattt

SEQ ID NO: 72972 - DNA, 40 bp, Homo sapiens
aattttaaaatttaattccattagaaaacaaaactgactt

SEQ ID NO: 72973 - DNA, 40 bp, Homo sapiens
aagtcagttttgttttctaatggaattaaattttaaaatt

SEQ ID NO: 72974 - DNA, 40 bp, Homo sapiens
attttaaaatttaattccattagaaaacaaaactgacttt

SEQ ID NO: 72975 - DNA, 40 bp, Homo sapiens
aaagtcagttttgttttctaatggaattaaattttaaaat

SEQ ID NO: 72976 - DNA, 40 bp, Homo sapiens
ttttaaaatttaattccattagaaaacaaaactgactttt

SEQ ID NO: 72977 - DNA, 40 bp, Homo sapiens
aaaagtcagttttgttttctaatggaattaaattttaaaa

SEQ ID NO: 72978 - DNA, 40 bp, Homo sapiens
tttaaaatttaattccattagaaaacaaaactgactttta

SEQ ID NO: 72979 - DNA, 40 bp, Homo sapiens
taaaagtcagttttgttttctaatggaattaaattttaaa

SEQ ID NO: 72980 - DNA, 40 bp, Homo sapiens
ttaaaatttaattccattagaaaacaaaactgacttttaa

SEQ ID NO: 72981 - DNA, 40 bp, Homo sapiens
ttaaaagtcagttttgttttctaatggaattaaattttaa

SEQ ID NO: 72982 - DNA, 40 bp, Homo sapiens
taaaatttaattccattagaaaacaaaactgacttttaag

SEQ ID NO: 72983 - DNA, 40 bp, Homo sapiens
cttaaaagtcagttttgttttctaatggaattaaatttta

SEQ ID NO: 72984 - DNA, 40 bp, Homo sapiens
aaaatttaattccattagaaaacaaaactgacttttaaga

SEQ ID NO: 72985 - DNA, 40 bp, Homo sapiens
tcttaaaagtcagttttgttttctaatggaattaaatttt

SEQ ID NO: 72986 - DNA, 40 bp, Homo sapiens
aaatttaattccattagaaaacaaaactgacttttaagaa

SEQ ID NO: 72987 - DNA, 40 bp, Homo sapiens
ttcttaaaagtcagttttgttttctaatggaattaaattt

SEQ ID NO: 72988 - DNA, 40 bp, Homo sapiens
aatttaattccattagaaaacaaaactgacttttaagaac

SEQ ID NO: 72989 - DNA, 40 bp, Homo sapiens
gttcttaaaagtcagttttgttttctaatggaattaaatt

SEQ ID NO: 72990 - DNA, 40 bp, Homo sapiens
atttaattccattagaaaacaaaactgacttttaagaaca

SEQ ID NO: 72991 - DNA, 40 bp, Homo sapiens
tgttcttaaaagtcagttttgttttctaatggaattaaat

SEQ ID NO: 72992 - DNA, 40 bp, Homo sapiens
tttaattccattagaaaacaaaactgacttttaagaacaa

SEQ ID NO: 72993 - DNA, 40 bp, Homo sapiens
ttgttcttaaaagtcagttttgttttctaatggaattaaa

SEQ ID NO: 72994 - DNA, 40 bp, Homo sapiens
ttaattccattagaaaacaaaactgacttttaagaacaaa

SEQ ID NO: 72995 - DNA, 40 bp, Homo sapiens
tttgttcttaaaagtcagttttgttttctaatggaattaa

SEQ ID NO: 72996 - DNA, 40 bp, Homo sapiens
taattccattagaaaacaaaactgacttttaagaacaaac

SEQ ID NO: 72997 - DNA, 40 bp, Homo sapiens
gtttgttcttaaaagtcagttttgttttctaatggaatta

SEQ ID NO: 72998 - DNA, 40 bp, Homo sapiens
aattccattagaaaacaaaactgacttttaagaacaaacc

SEQ ID NO: 72999 - DNA, 40 bp, Homo sapiens
ggtttgttcttaaaagtcagttttgttttctaatggaatt

SEQ ID NO: 73000 - DNA, 40 bp, Homo sapiens
attccattagaaaacaaaactgacttttaagaacaaacca

SEQ ID NO: 73001 - DNA, 40 bp, Homo sapiens
tggtttgttcttaaaagtcagttttgttttctaatggaat

SEQ ID NO: 73002 - DNA, 40 bp, Homo sapiens
ttccattagaaaacaaaactgacttttaagaacaaaccag

SEQ ID NO: 73003 - DNA, 40 bp, Homo sapiens
ctggtttgttcttaaaagtcagttttgttttctaatggaa

SEQ ID NO: 73004 - DNA, 40 bp, Homo sapiens
tccattagaaaacaaaactgacttttaagaacaaaccagg

SEQ ID NO: 73005 - DNA, 40 bp, Homo sapiens
cctggtttgttcttaaaagtcagttttgttttctaatgga

SEQ ID NO: 73006 - DNA, 40 bp, Homo sapiens
ccattagaaaacaaaactgacttttaagaacaaaccagga

SEQ ID NO: 73007 - DNA, 40 bp, Homo sapiens
tcctggtttgttcttaaaagtcagttttgttttctaatgg

SEQ ID NO: 73008 - DNA, 40 bp, Homo sapiens
cattagaaaacaaaactgacttttaagaacaaaccaggat

SEQ ID NO: 73009 - DNA, 40 bp, Homo sapiens
atcctggtttgttcttaaaagtcagttttgttttctaatg

SEQ ID NO: 73010 - DNA, 40 bp, Homo sapiens
attagaaaacaaaactgacttttaagaacaaaccaggatt

SEQ ID NO: 73011 - DNA, 40 bp, Homo sapiens
aatcctggtttgttcttaaaagtcagttttgttttctaat

SEQ ID NO: 73012 - DNA, 40 bp, Homo sapiens
ttagaaaacaaaactgacttttaagaacaaaccaggattc

SEQ ID NO: 73013 - DNA, 40 bp, Homo sapiens
gaatcctggtttgttcttaaaagtcagttttgttttctaa

SEQ ID NO: 73014 - DNA, 40 bp, Homo sapiens
tagaaaacaaaactgacttttaagaacaaaccaggattct

SEQ ID NO: 73015 - DNA, 40 bp, Homo sapiens
agaatcctggtttgttcttaaaagtcagttttgttttcta

SEQ ID NO: 73016 - DNA, 40 bp, Homo sapiens
agaaaacaaaactgacttttaagaacaaaccaggattcta

SEQ ID NO: 73017 - DNA, 40 bp, Homo sapiens
tagaatcctggtttgttcttaaaagtcagttttgttttct

SEQ ID NO: 73018 - DNA, 40 bp, Homo sapiens
gaaaacaaaactgacttttaagaacaaaccaggattctag

SEQ ID NO: 73019 - DNA, 40 bp, Homo sapiens
ctagaatcctggtttgttcttaaaagtcagttttgttttc

SEQ ID NO: 73020 - DNA, 40 bp, Homo sapiens
aaaacaaaactgacttttaagaacaaaccaggattctagc

SEQ ID NO: 73021 - DNA, 40 bp, Homo sapiens
gctagaatcctggtttgttcttaaaagtcagttttgtttt

SEQ ID NO: 73022 - DNA, 40 bp, Homo sapiens
aaacaaaactgacttttaagaacaaaccaggattctagcc

SEQ ID NO: 73023 - DNA, 40 bp, Homo sapiens
ggctagaatcctggtttgttcttaaaagtcagttttgttt

SEQ ID NO: 73024 - DNA, 40 bp, Homo sapiens
aacaaaactgacttttaagaacaaaccaggattctagccc

SEQ ID NO: 73025 - DNA, 40 bp, Homo sapiens
gggctagaatcctggtttgttcttaaaagtcagttttgtt

SEQ ID NO: 73026 - DNA, 40 bp, Homo sapiens
acaaaactgacttttaagaacaaaccaggattctagccca

SEQ ID NO: 73027 - DNA, 40 bp, Homo sapiens
tgggctagaatcctggtttgttcttaaaagtcagttttgt

SEQ ID NO: 73028 - DNA, 40 bp, Homo sapiens
caaaactgacttttaagaacaaaccaggattctagcccat

SEQ ID NO: 73029 - DNA, 40 bp, Homo sapiens
atgggctagaatcctggtttgttcttaaaagtcagttttg

SEQ ID NO: 73030 - DNA, 40 bp, Homo sapiens
aaaactgacttttaagaacaaaccaggattctagcccata

SEQ ID NO: 73031 - DNA, 40 bp, Homo sapiens
tatgggctagaatcctggtttgttcttaaaagtcagtttt

SEQ ID NO: 73032 - DNA, 40 bp, Homo sapiens
aaactgacttttaagaacaaaccaggattctagcccatat

SEQ ID NO: 73033 - DNA, 40 bp, Homo sapiens
atatgggctagaatcctggtttgttcttaaaagtcagttt

SEQ ID NO: 73034 - DNA, 40 bp, Homo sapiens
aactgacttttaagaacaaaccaggattctagcccatatt

SEQ ID NO: 73035 - DNA, 40 bp, Homo sapiens
aatatgggctagaatcctggtttgttcttaaaagtcagtt

SEQ ID NO: 73036 - DNA, 40 bp, Homo sapiens
actgacttttaagaacaaaccaggattctagcccatattt

SEQ ID NO: 73037 - DNA, 40 bp, Homo sapiens
aaatatgggctagaatcctggtttgttcttaaaagtcagt

SEQ ID NO: 73038 - DNA, 40 bp, Homo sapiens
ctgacttttaagaacaaaccaggattctagcccatatttt

SEQ ID NO: 73039 - DNA, 40 bp, Homo sapiens
aaaatatgggctagaatcctggtttgttcttaaaagtcag

SEQ ID NO: 73040 - DNA, 40 bp, Homo sapiens
tgacttttaagaacaaaccaggattctagcccatatttta

SEQ ID NO: 73041 - DNA, 40 bp, Homo sapiens
taaaatatgggctagaatcctggtttgttcttaaaagtca

SEQ ID NO: 73042 - DNA, 40 bp, Homo sapiens
gacttttaagaacaaaccaggattctagcccatattttaa

SEQ ID NO: 73043 - DNA, 40 bp, Homo sapiens
ttaaaatatgggctagaatcctggtttgttcttaaaagtc

SEQ ID NO: 73044 - DNA, 40 bp, Homo sapiens
acttttaagaacaaaccaggattctagcccatattttaaa

SEQ ID NO: 73045 - DNA, 40 bp, Homo sapiens
tttaaaatatgggctagaatcctggtttgttcttaaaagt

SEQ ID NO: 73046 - DNA, 40 bp, Homo sapiens
cttttaagaacaaaccaggattctagcccatattttaaaa

SEQ ID NO: 73047 - DNA, 40 bp, Homo sapiens
ttttaaaatatgggctagaatcctggtttgttcttaaaag

SEQ ID NO: 73048 - DNA, 40 bp, Homo sapiens
ttttaagaacaaaccaggattctagcccatattttaaaac

SEQ ID NO: 73049 - DNA, 40 bp, Homo sapiens
gttttaaaatatgggctagaatcctggtttgttcttaaaa

SEQ ID NO: 73050 - DNA, 40 bp, Homo sapiens
tttaagaacaaaccaggattctagcccatattttaaaact

SEQ ID NO: 73051 - DNA, 40 bp, Homo sapiens
agttttaaaatatgggctagaatcctggtttgttcttaaa

SEQ ID NO: 73052 - DNA, 40 bp, Homo sapiens
ttaagaacaaaccaggattctagcccatattttaaaactg

SEQ ID NO: 73053 - DNA, 40 bp, Homo sapiens
cagttttaaaatatgggctagaatcctggtttgttcttaa

SEQ ID NO: 73054 - DNA, 40 bp, Homo sapiens
taagaacaaaccaggattctagcccatattttaaaactgc

SEQ ID NO: 73055 - DNA, 40 bp, Homo sapiens
gcagttttaaaatatgggctagaatcctggtttgttctta

SEQ ID NO: 73056 - DNA, 40 bp, Homo sapiens
aagaacaaaccaggattctagcccatattttaaaactgca

SEQ ID NO: 73057 - DNA, 40 bp, Homo sapiens
tgcagttttaaaatatgggctagaatcctggtttgttctt

SEQ ID NO: 73058 - DNA, 40 bp, Homo sapiens
agaacaaaccaggattctagcccatattttaaaactgcat

SEQ ID NO: 73059 - DNA, 40 bp, Homo sapiens
atgcagttttaaaatatgggctagaatcctggtttgttct

SEQ ID NO: 73060 - DNA, 40 bp, Homo sapiens
gaacaaaccaggattctagcccatattttaaaactgcatc

SEQ ID NO: 73061 - DNA, 40 bp, Homo sapiens
gatgcagttttaaaatatgggctagaatcctggtttgttc

SEQ ID NO: 73062 - DNA, 40 bp, Homo sapiens
aacaaaccaggattctagcccatattttaaaactgcatcc

SEQ ID NO: 73063 - DNA, 40 bp, Homo sapiens
ggatgcagttttaaaatatgggctagaatcctggtttgtt

SEQ ID NO: 73064 - DNA, 40 bp, Homo sapiens
acaaaccaggattctagcccatattttaaaactgcatcct

SEQ ID NO: 73065 - DNA, 40 bp, Homo sapiens
aggatgcagttttaaaatatgggctagaatcctggtttgt

SEQ ID NO: 73066 - DNA, 40 bp, Homo sapiens
caaaccaggattctagcccatattttaaaactgcatcctc

SEQ ID NO: 73067 - DNA, 40 bp, Homo sapiens
gaggatgcagttttaaaatatgggctagaatcctggtttg

SEQ ID NO: 73068 - DNA, 40 bp, Homo sapiens
aaaccaggattctagcccatattttaaaactgcatcctca

SEQ ID NO: 73069 - DNA, 40 bp, Homo sapiens
tgaggatgcagttttaaaatatgggctagaatcctggttt

SEQ ID NO: 73070 - DNA, 40 bp, Homo sapiens
aaccaggattctagcccatattttaaaactgcatcctcag

SEQ ID NO: 73071 - DNA, 40 bp, Homo sapiens
ctgaggatgcagttttaaaatatgggctagaatcctggtt

SEQ ID NO: 73072 - DNA, 40 bp, Homo sapiens
accaggattctagcccatattttaaaactgcatcctcagt

SEQ ID NO: 73073 - DNA, 40 bp, Homo sapiens
actgaggatgcagttttaaaatatgggctagaatcctggt

SEQ ID NO: 73074 - DNA, 40 bp, Homo sapiens
ccaggattctagcccatattttaaaactgcatcctcagtt

SEQ ID NO: 73075 - DNA, 40 bp, Homo sapiens
aactgaggatgcagttttaaaatatgggctagaatcctgg

SEQ ID NO: 73076 - DNA, 40 bp, Homo sapiens
caggattctagcccatattttaaaactgcatcctcagttt

SEQ ID NO: 73077 - DNA, 40 bp, Homo sapiens
aaactgaggatgcagttttaaaatatgggctagaatcctg

SEQ ID NO: 73078 - DNA, 40 bp, Homo sapiens
aggattctagcccatattttaaaactgcatcctcagtttt

SEQ ID NO: 73079 - DNA, 40 bp, Homo sapiens
aaaactgaggatgcagttttaaaatatgggctagaatcct

SEQ ID NO: 73080 - DNA, 40 bp, Homo sapiens
ggattctagcccatattttaaaactgcatcctcagtttta

SEQ ID NO: 73081 - DNA, 40 bp, Homo sapiens
taaaactgaggatgcagttttaaaatatgggctagaatcc

SEQ ID NO: 73082 - DNA, 40 bp, Homo sapiens
gattctagcccatattttaaaactgcatcctcagttttat

SEQ ID NO: 73083 - DNA, 40 bp, Homo sapiens
ataaaactgaggatgcagttttaaaatatgggctagaatc

SEQ ID NO: 73084 - DNA, 40 bp, Homo sapiens
attctagcccatattttaaaactgcatcctcagttttatt

SEQ ID NO: 73085 - DNA, 40 bp, Homo sapiens
aataaaactgaggatgcagttttaaaatatgggctagaat

SEQ ID NO: 73086 - DNA, 40 bp, Homo sapiens
ttctagcccatattttaaaactgcatcctcagttttattc

SEQ ID NO: 73087 - DNA, 40 bp, Homo sapiens
gaataaaactgaggatgcagttttaaaatatgggctagaa

SEQ ID NO: 73088 - DNA, 40 bp, Homo sapiens
tctagcccatattttaaaactgcatcctcagttttattca

SEQ ID NO: 73089 - DNA, 40 bp, Homo sapiens
tgaataaaactgaggatgcagttttaaaatatgggctaga

SEQ ID NO: 73090 - DNA, 40 bp, Homo sapiens
ctagcccatattttaaaactgcatcctcagttttattcaa

SEQ ID NO: 73091 - DNA, 40 bp, Homo sapiens
ttgaataaaactgaggatgcagttttaaaatatgggctag

SEQ ID NO: 73092 - DNA, 40 bp, Homo sapiens
tagcccatattttaaaactgcatcctcagttttattcaaa

SEQ ID NO: 73093 - DNA, 40 bp, Homo sapiens
tttgaataaaactgaggatgcagttttaaaatatgggcta

SEQ ID NO: 73094 - DNA, 40 bp, Homo sapiens
agcccatattttaaaactgcatcctcagttttattcaaac

SEQ ID NO: 73095 - DNA, 40 bp, Homo sapiens
gtttgaataaaactgaggatgcagttttaaaatatgggct

SEQ ID NO: 73096 - DNA, 40 bp, Homo sapiens
gcccatattttaaaactgcatcctcagttttattcaaaca

SEQ ID NO: 73097 - DNA, 40 bp, Homo sapiens
tgtttgaataaaactgaggatgcagttttaaaatatgggc

SEQ ID NO: 73098 - DNA, 40 bp, Homo sapiens
cccatattttaaaactgcatcctcagttttattcaaacag

SEQ ID NO: 73099 - DNA, 40 bp, Homo sapiens
ctgtttgaataaaactgaggatgcagttttaaaatatggg

SEQ ID NO: 73100 - DNA, 40 bp, Homo sapiens
ccatattttaaaactgcatcctcagttttattcaaacagt

SEQ ID NO: 73101 - DNA, 40 bp, Homo sapiens
actgtttgaataaaactgaggatgcagttttaaaatatgg

SEQ ID NO: 73102 - DNA, 40 bp, Homo sapiens
catattttaaaactgcatcctcagttttattcaaacagtc

SEQ ID NO: 73103 - DNA, 40 bp, Homo sapiens
gactgtttgaataaaactgaggatgcagttttaaaatatg

SEQ ID NO: 73104 - DNA, 40 bp, Homo sapiens
atattttaaaactgcatcctcagttttattcaaacagtct

SEQ ID NO: 73105 - DNA, 40 bp, Homo sapiens
agactgtttgaataaaactgaggatgcagttttaaaatat

SEQ ID NO: 73106 - DNA, 40 bp, Homo sapiens
tattttaaaactgcatcctcagttttattcaaacagtctg

SEQ ID NO: 73107 - DNA, 40 bp, Homo sapiens
cagactgtttgaataaaactgaggatgcagttttaaaata

SEQ ID NO: 73108 - DNA, 40 bp, Homo sapiens
attttaaaactgcatcctcagttttattcaaacagtctga

SEQ ID NO: 73109 - DNA, 40 bp, Homo sapiens
tcagactgtttgaataaaactgaggatgcagttttaaaat

SEQ ID NO: 73110 - DNA, 40 bp, Homo sapiens
ttttaaaactgcatcctcagttttattcaaacagtctgat

SEQ ID NO: 73111 - DNA, 40 bp, Homo sapiens
atcagactgtttgaataaaactgaggatgcagttttaaaa

SEQ ID NO: 73112 - DNA, 40 bp, Homo sapiens
tttaaaactgcatcctcagttttattcaaacagtctgatg

SEQ ID NO: 73113 - DNA, 40 bp, Homo sapiens
catcagactgtttgaataaaactgaggatgcagttttaaa

SEQ ID NO: 73114 - DNA, 40 bp, Homo sapiens
ttaaaactgcatcctcagttttattcaaacagtctgatgt

SEQ ID NO: 73115 - DNA, 40 bp, Homo sapiens
acatcagactgtttgaataaaactgaggatgcagttttaa

SEQ ID NO: 73116 - DNA, 40 bp, Homo sapiens
taaaactgcatcctcagttttattcaaacagtctgatgtc

SEQ ID NO: 73117 - DNA, 40 bp, Homo sapiens
gacatcagactgtttgaataaaactgaggatgcagtttta

SEQ ID NO: 73118 - DNA, 40 bp, Homo sapiens
aaaactgcatcctcagttttattcaaacagtctgatgtct

SEQ ID NO: 73119 - DNA, 40 bp, Homo sapiens
agacatcagactgtttgaataaaactgaggatgcagtttt

SEQ ID NO: 73120 - DNA, 40 bp, Homo sapiens
aaactgcatcctcagttttattcaaacagtctgatgtctg

SEQ ID NO: 73121 - DNA, 40 bp, Homo sapiens
cagacatcagactgtttgaataaaactgaggatgcagttt

SEQ ID NO: 73122 - DNA, 40 bp, Homo sapiens
aactgcatcctcagttttattcaaacagtctgatgtctgt

SEQ ID NO: 73123 - DNA, 40 bp, Homo sapiens
acagacatcagactgtttgaataaaactgaggatgcagtt

SEQ ID NO: 73124 - DNA, 40 bp, Homo sapiens
actgcatcctcagttttattcaaacagtctgatgtctgtt

SEQ ID NO: 73125 - DNA, 40 bp, Homo sapiens
aacagacatcagactgtttgaataaaactgaggatgcagt

SEQ ID NO: 73126 - DNA, 40 bp, Homo sapiens
ctgcatcctcagttttattcaaacagtctgatgtctgttt

SEQ ID NO: 73127 - DNA, 40 bp, Homo sapiens
aaacagacatcagactgtttgaataaaactgaggatgcag

SEQ ID NO: 73128 - DNA, 40 bp, Homo sapiens
tgcatcctcagttttattcaaacagtctgatgtctgttta

SEQ ID NO: 73129 - DNA, 40 bp, Homo sapiens
taaacagacatcagactgtttgaataaaactgaggatgca

SEQ ID NO: 73130 - DNA, 40 bp, Homo sapiens
gcatcctcagttttattcaaacagtctgatgtctgtttaa

SEQ ID NO: 73131 - DNA, 40 bp, Homo sapiens
ttaaacagacatcagactgtttgaataaaactgaggatgc

SEQ ID NO: 73132 - DNA, 40 bp, Homo sapiens
catcctcagttttattcaaacagtctgatgtctgtttaaa

SEQ ID NO: 73133 - DNA, 40 bp, Homo sapiens
tttaaacagacatcagactgtttgaataaaactgaggatg

SEQ ID NO: 73134 - DNA, 40 bp, Homo sapiens
atcctcagttttattcaaacagtctgatgtctgtttaaaa

SEQ ID NO: 73135 - DNA, 40 bp, Homo sapiens
ttttaaacagacatcagactgtttgaataaaactgaggat

SEQ ID NO: 73136 - DNA, 40 bp, Homo sapiens
tcctcagttttattcaaacagtctgatgtctgtttaaaaa

SEQ ID NO: 73137 - DNA, 40 bp, Homo sapiens
tttttaaacagacatcagactgtttgaataaaactgagga

SEQ ID NO: 73138 - DNA, 40 bp, Homo sapiens
cctcagttttattcaaacagtctgatgtctgtttaaaaaa

SEQ ID NO: 73139 - DNA, 40 bp, Homo sapiens
ttttttaaacagacatcagactgtttgaataaaactgagg

SEQ ID NO: 73140 - DNA, 40 bp, Homo sapiens
ctcagttttattcaaacagtctgatgtctgtttaaaaaaa

SEQ ID NO: 73141 - DNA, 40 bp, Homo sapiens
tttttttaaacagacatcagactgtttgaataaaactgag

SEQ ID NO: 73142 - DNA, 40 bp, Homo sapiens
tcagttttattcaaacagtctgatgtctgtttaaaaaaaa

SEQ ID NO: 73143 - DNA, 40 bp, Homo sapiens
ttttttttaaacagacatcagactgtttgaataaaactga

SEQ ID NO: 73144 - DNA, 40 bp, Homo sapiens
cagttttattcaaacagtctgatgtctgtttaaaaaaaaa

SEQ ID NO: 73145 - DNA, 40 bp, Homo sapiens
tttttttttaaacagacatcagactgtttgaataaaactg

SEQ ID NO: 73146 - DNA, 40 bp, Homo sapiens
agttttattcaaacagtctgatgtctgtttaaaaaaaaaa

SEQ ID NO: 73147 - DNA, 40 bp, Homo sapiens
ttttttttttaaacagacatcagactgtttgaataaaact

SEQ ID NO: 73148 - DNA, 40 bp, Homo sapiens
gttttattcaaacagtctgatgtctgtttaaaaaaaaaaa

SEQ ID NO: 73149 - DNA, 40 bp, Homo sapiens
tttttttttttaaacagacatcagactgtttgaataaaac

SEQ ID NO: 73150 - DNA, 40 bp, Homo sapiens
ttttattcaaacagtctgatgtctgtttaaaaaaaaaaaa

SEQ ID NO: 73151 - DNA, 40 bp, Homo sapiens
ttttttttttttaaacagacatcagactgtttgaataaaa

SEQ ID NO: 73152 - DNA, 40 bp, Homo sapiens
tttattcaaacagtctgatgtctgtttaaaaaaaaaaaaa

SEQ ID NO: 73153 - DNA, 40 bp, Homo sapiens
tttttttttttttaaacagacatcagactgtttgaataaa

SEQ ID NO: 73154 - DNA, 40 bp, Homo sapiens
ttattcaaacagtctgatgtctgtttaaaaaaaaaaaaat

SEQ ID NO: 73155 - DNA, 40 bp, Homo sapiens
atttttttttttttaaacagacatcagactgtttgaataa

SEQ ID NO: 73156 - DNA, 40 bp, Homo sapiens
tattcaaacagtctgatgtctgtttaaaaaaaaaaaaatc

SEQ ID NO: 73157 - DNA, 40 bp, Homo sapiens
gatttttttttttttaaacagacatcagactgtttgaata

SEQ ID NO: 73158 - DNA, 40 bp, Homo sapiens
attcaaacagtctgatgtctgtttaaaaaaaaaaaaatct

SEQ ID NO: 73159 - DNA, 40 bp, Homo sapiens
agatttttttttttttaaacagacatcagactgtttgaat

SEQ ID NO: 73160 - DNA, 40 bp, Homo sapiens
ttcaaacagtctgatgtctgtttaaaaaaaaaaaaatctc

SEQ ID NO: 73161 - DNA, 40 bp, Homo sapiens
gagatttttttttttttaaacagacatcagactgtttgaa

SEQ ID NO: 73162 - DNA, 40 bp, Homo sapiens
tcaaacagtctgatgtctgtttaaaaaaaaaaaaatctca

SEQ ID NO: 73163 - DNA, 40 bp, Homo sapiens
tgagatttttttttttttaaacagacatcagactgtttga

SEQ ID NO: 73164 - DNA, 40 bp, Homo sapiens
caaacagtctgatgtctgtttaaaaaaaaaaaaatctcaa

SEQ ID NO: 73165 - DNA, 40 bp, Homo sapiens
ttgagatttttttttttttaaacagacatcagactgtttg

SEQ ID NO: 73166 - DNA, 40 bp, Homo sapiens
aaacagtctgatgtctgtttaaaaaaaaaaaaatctcaag

SEQ ID NO: 73167 - DNA, 40 bp, Homo sapiens
cttgagatttttttttttttaaacagacatcagactgttt

SEQ ID NO: 73168 - DNA, 40 bp, Homo sapiens
aacagtctgatgtctgtttaaaaaaaaaaaaatctcaagc

SEQ ID NO: 73169 - DNA, 40 bp, Homo sapiens
gcttgagatttttttttttttaaacagacatcagactgtt

SEQ ID NO: 73170 - DNA, 40 bp, Homo sapiens
acagtctgatgtctgtttaaaaaaaaaaaaatctcaagct

SEQ ID NO: 73171 - DNA, 40 bp, Homo sapiens
agcttgagatttttttttttttaaacagacatcagactgt

SEQ ID NO: 73172 - DNA, 40 bp, Homo sapiens
cagtctgatgtctgtttaaaaaaaaaaaaatctcaagctc

SEQ ID NO: 73173 - DNA, 40 bp, Homo sapiens
gagcttgagatttttttttttttaaacagacatcagactg

SEQ ID NO: 73174 - DNA, 40 bp, Homo sapiens
agtctgatgtctgtttaaaaaaaaaaaaatctcaagctca

SEQ ID NO: 73175 - DNA, 40 bp, Homo sapiens
tgagcttgagatttttttttttttaaacagacatcagact

SEQ ID NO: 73176 - DNA, 40 bp, Homo sapiens
gtctgatgtctgtttaaaaaaaaaaaaatctcaagctcat

SEQ ID NO: 73177 - DNA, 40 bp, Homo sapiens
atgagcttgagatttttttttttttaaacagacatcagac

SEQ ID NO: 73178 - DNA, 40 bp, Homo sapiens
tctgatgtctgtttaaaaaaaaaaaaatctcaagctcata

SEQ ID NO: 73179 - DNA, 40 bp, Homo sapiens
tatgagcttgagatttttttttttttaaacagacatcaga

SEQ ID NO: 73180 - DNA, 40 bp, Homo sapiens
ctgatgtctgtttaaaaaaaaaaaaatctcaagctcataa

SEQ ID NO: 73181 - DNA, 40 bp, Homo sapiens
ttatgagcttgagatttttttttttttaaacagacatcag

SEQ ID NO: 73182 - DNA, 40 bp, Homo sapiens
tgatgtctgtttaaaaaaaaaaaaatctcaagctcataat

SEQ ID NO: 73183 - DNA, 40 bp, Homo sapiens
attatgagcttgagatttttttttttttaaacagacatca

SEQ ID NO: 73184 - DNA, 40 bp, Homo sapiens
gatgtctgtttaaaaaaaaaaaaatctcaagctcataatc

SEQ ID NO: 73185 - DNA, 40 bp, Homo sapiens
gattatgagcttgagatttttttttttttaaacagacatc

SEQ ID NO: 73186 - DNA, 40 bp, Homo sapiens
atgtctgtttaaaaaaaaaaaaatctcaagctcataatct

SEQ ID NO: 73187 - DNA, 40 bp, Homo sapiens
agattatgagcttgagatttttttttttttaaacagacat

SEQ ID NO: 73188 - DNA, 40 bp, Homo sapiens
tgtctgtttaaaaaaaaaaaaatctcaagctcataatctc

SEQ ID NO: 73189 - DNA, 40 bp, Homo sapiens
gagattatgagcttgagatttttttttttttaaacagaca

SEQ ID NO: 73190 - DNA, 40 bp, Homo sapiens
gtctgtttaaaaaaaaaaaaatctcaagctcataatctca

SEQ ID NO: 73191 - DNA, 40 bp, Homo sapiens
tgagattatgagcttgagatttttttttttttaaacagac

SEQ ID NO: 73192 - DNA, 40 bp, Homo sapiens
tctgtttaaaaaaaaaaaaatctcaagctcataatctcaa

SEQ ID NO: 73193 - DNA, 40 bp, Homo sapiens
ttgagattatgagcttgagatttttttttttttaaacaga

SEQ ID NO: 73194 - DNA, 40 bp, Homo sapiens
ctgtttaaaaaaaaaaaaatctcaagctcataatctcaaa

SEQ ID NO: 73195 - DNA, 40 bp, Homo sapiens
tttgagattatgagcttgagatttttttttttttaaacag

SEQ ID NO: 73196 - DNA, 40 bp, Homo sapiens
tgtttaaaaaaaaaaaaatctcaagctcataatctcaaac

SEQ ID NO: 73197 - DNA, 40 bp, Homo sapiens
gtttgagattatgagcttgagatttttttttttttaaaca

SEQ ID NO: 73198 - DNA, 40 bp, Homo sapiens
gtttaaaaaaaaaaaaatctcaagctcataatctcaaact

SEQ ID NO: 73199 - DNA, 40 bp, Homo sapiens
agtttgagattatgagcttgagatttttttttttttaaac

SEQ ID NO: 73200 - DNA, 40 bp, Homo sapiens
tttaaaaaaaaaaaaatctcaagctcataatctcaaactt

SEQ ID NO: 73201 - DNA, 40 bp, Homo sapiens
aagtttgagattatgagcttgagatttttttttttttaaa

SEQ ID NO: 73202 - DNA, 40 bp, Homo sapiens
ttaaaaaaaaaaaaatctcaagctcataatctcaaacttc

SEQ ID NO: 73203 - DNA, 40 bp, Homo sapiens
gaagtttgagattatgagcttgagatttttttttttttaa

SEQ ID NO: 73204 - DNA, 40 bp, Homo sapiens
taaaaaaaaaaaaatctcaagctcataatctcaaacttct

SEQ ID NO: 73205 - DNA, 40 bp, Homo sapiens
agaagtttgagattatgagcttgagattttttttttttta

SEQ ID NO: 73206 - DNA, 40 bp, Homo sapiens
aaaaaaaaaaaaatctcaagctcataatctcaaacttctt

SEQ ID NO: 73207 - DNA, 40 bp, Homo sapiens
aagaagtttgagattatgagcttgagattttttttttttt

SEQ ID NO: 73208 - DNA, 40 bp, Homo sapiens
aaaaaaaaaaaatctcaagctcataatctcaaacttcttg

SEQ ID NO: 73209 - DNA, 40 bp, Homo sapiens
caagaagtttgagattatgagcttgagatttttttttttt

SEQ ID NO: 73210 - DNA, 40 bp, Homo sapiens
aaaaaaaaaaatctcaagctcataatctcaaacttcttgc

SEQ ID NO: 73211 - DNA, 40 bp, Homo sapiens
gcaagaagtttgagattatgagcttgagattttttttttt

SEQ ID NO: 73212 - DNA, 40 bp, Homo sapiens
aaaaaaaaaatctcaagctcataatctcaaacttcttgca

SEQ ID NO: 73213 - DNA, 40 bp, Homo sapiens
tgcaagaagtttgagattatgagcttgagatttttttttt

SEQ ID NO: 73214 - DNA, 40 bp, Homo sapiens
aaaaaaaaatctcaagctcataatctcaaacttcttgcac

SEQ ID NO: 73215 - DNA, 40 bp, Homo sapiens
gtgcaagaagtttgagattatgagcttgagattttttttt

SEQ ID NO: 73216 - DNA, 40 bp, Homo sapiens
aaaaaaaatctcaagctcataatctcaaacttcttgcaca

SEQ ID NO: 73217 - DNA, 40 bp, Homo sapiens
tgtgcaagaagtttgagattatgagcttgagatttttttt

SEQ ID NO: 73218 - DNA, 40 bp, Homo sapiens
aaaaaaatctcaagctcataatctcaaacttcttgcacat

SEQ ID NO: 73219 - DNA, 40 bp, Homo sapiens
atgtgcaagaagtttgagattatgagcttgagattttttt

SEQ ID NO: 73220 - DNA, 40 bp, Homo sapiens
aaaaaatctcaagctcataatctcaaacttcttgcacatg

SEQ ID NO: 73221 - DNA, 40 bp, Homo sapiens
catgtgcaagaagtttgagattatgagcttgagatttttt

SEQ ID NO: 73222 - DNA, 40 bp, Homo sapiens
aaaaatctcaagctcataatctcaaacttcttgcacatgg

SEQ ID NO: 73223 - DNA, 40 bp, Homo sapiens
ccatgtgcaagaagtttgagattatgagcttgagattttt

SEQ ID NO: 73224 - DNA, 40 bp, Homo sapiens
aaaatctcaagctcataatctcaaacttcttgcacatggc

SEQ ID NO: 73225 - DNA, 40 bp, Homo sapiens
gccatgtgcaagaagtttgagattatgagcttgagatttt

SEQ ID NO: 73226 - DNA, 40 bp, Homo sapiens
aaatctcaagctcataatctcaaacttcttgcacatggct

SEQ ID NO: 73227 - DNA, 40 bp, Homo sapiens
agccatgtgcaagaagtttgagattatgagcttgagattt

SEQ ID NO: 73228 - DNA, 40 bp, Homo sapiens
aatctcaagctcataatctcaaacttcttgcacatggctt

SEQ ID NO: 73229 - DNA, 40 bp, Homo sapiens
aagccatgtgcaagaagtttgagattatgagcttgagatt

SEQ ID NO: 73230 - DNA, 40 bp, Homo sapiens
atctcaagctcataatctcaaacttcttgcacatggcttt

SEQ ID NO: 73231 - DNA, 40 bp, Homo sapiens
aaagccatgtgcaagaagtttgagattatgagcttgagat

SEQ ID NO: 73232 - DNA, 40 bp, Homo sapiens
tctcaagctcataatctcaaacttcttgcacatggctttc

SEQ ID NO: 73233 - DNA, 40 bp, Homo sapiens
gaaagccatgtgcaagaagtttgagattatgagcttgaga

SEQ ID NO: 73234 - DNA, 40 bp, Homo sapiens
ctcaagctcataatctcaaacttcttgcacatggctttcc

SEQ ID NO: 73235 - DNA, 40 bp, Homo sapiens
ggaaagccatgtgcaagaagtttgagattatgagcttgag

SEQ ID NO: 73236 - DNA, 40 bp, Homo sapiens
tcaagctcataatctcaaacttcttgcacatggctttccc

SEQ ID NO: 73237 - DNA, 40 bp, Homo sapiens
gggaaagccatgtgcaagaagtttgagattatgagcttga

SEQ ID NO: 73238 - DNA, 40 bp, Homo sapiens
caagctcataatctcaaacttcttgcacatggctttccca

SEQ ID NO: 73239 - DNA, 40 bp, Homo sapiens
tgggaaagccatgtgcaagaagtttgagattatgagcttg

SEQ ID NO: 73240 - DNA, 40 bp, Homo sapiens
aagctcataatctcaaacttcttgcacatggctttcccag

SEQ ID NO: 73241 - DNA, 40 bp, Homo sapiens
ctgggaaagccatgtgcaagaagtttgagattatgagctt

SEQ ID NO: 73242 - DNA, 40 bp, Homo sapiens
agctcataatctcaaacttcttgcacatggctttcccagt

SEQ ID NO: 73243 - DNA, 40 bp, Homo sapiens
actgggaaagccatgtgcaagaagtttgagattatgagct

SEQ ID NO: 73244 - DNA, 40 bp, Homo sapiens
gctcataatctcaaacttcttgcacatggctttcccagta

SEQ ID NO: 73245 - DNA, 40 bp, Homo sapiens
tactgggaaagccatgtgcaagaagtttgagattatgagc

SEQ ID NO: 73246 - DNA, 40 bp, Homo sapiens
ctcataatctcaaacttcttgcacatggctttcccagtaa

SEQ ID NO: 73247 - DNA, 40 bp, Homo sapiens
ttactgggaaagccatgtgcaagaagtttgagattatgag

SEQ ID NO: 73248 - DNA, 40 bp, Homo sapiens
tcataatctcaaacttcttgcacatggctttcccagtaaa

SEQ ID NO: 73249 - DNA, 40 bp, Homo sapiens
tttactgggaaagccatgtgcaagaagtttgagattatga

SEQ ID NO: 73250 - DNA, 40 bp, Homo sapiens
cataatctcaaacttcttgcacatggctttcccagtaaat

SEQ ID NO: 73251 - DNA, 40 bp, Homo sapiens
atttactgggaaagccatgtgcaagaagtttgagattatg

SEQ ID NO: 73252 - DNA, 40 bp, Homo sapiens
ataatctcaaacttcttgcacatggctttcccagtaaatt

SEQ ID NO: 73253 - DNA, 40 bp, Homo sapiens
aatttactgggaaagccatgtgcaagaagtttgagattat

SEQ ID NO: 73254 - DNA, 40 bp, Homo sapiens
taatctcaaacttcttgcacatggctttcccagtaaatta

SEQ ID NO: 73255 - DNA, 40 bp, Homo sapiens
taatttactgggaaagccatgtgcaagaagtttgagatta

SEQ ID NO: 73256 - DNA, 40 bp, Homo sapiens
aatctcaaacttcttgcacatggctttcccagtaaattac

SEQ ID NO: 73257 - DNA, 40 bp, Homo sapiens
gtaatttactgggaaagccatgtgcaagaagtttgagatt

SEQ ID NO: 73258 - DNA, 40 bp, Homo sapiens
atctcaaacttcttgcacatggctttcccagtaaattact

SEQ ID NO: 73259 - DNA, 40 bp, Homo sapiens
agtaatttactgggaaagccatgtgcaagaagtttgagat

SEQ ID NO: 73260 - DNA, 40 bp, Homo sapiens
tctcaaacttcttgcacatggctttcccagtaaattactc

SEQ ID NO: 73261 - DNA, 40 bp, Homo sapiens
gagtaatttactgggaaagccatgtgcaagaagtttgaga

SEQ ID NO: 73262 - DNA, 40 bp, Homo sapiens
ctcaaacttcttgcacatggctttcccagtaaattactct

SEQ ID NO: 73263 - DNA, 40 bp, Homo sapiens
agagtaatttactgggaaagccatgtgcaagaagtttgag

SEQ ID NO: 73264 - DNA, 40 bp, Homo sapiens
tcaaacttcttgcacatggctttcccagtaaattactctt

SEQ ID NO: 73265 - DNA, 40 bp, Homo sapiens
aagagtaatttactgggaaagccatgtgcaagaagtttga

SEQ ID NO: 73266 - DNA, 40 bp, Homo sapiens
caaacttcttgcacatggctttcccagtaaattactctta

SEQ ID NO: 73267 - DNA, 40 bp, Homo sapiens
taagagtaatttactgggaaagccatgtgcaagaagtttg

SEQ ID NO: 73268 - DNA, 40 bp, Homo sapiens
aaacttcttgcacatggctttcccagtaaattactcttac

SEQ ID NO: 73269 - DNA, 40 bp, Homo sapiens
gtaagagtaatttactgggaaagccatgtgcaagaagttt

SEQ ID NO: 73270 - DNA, 40 bp, Homo sapiens
aacttcttgcacatggctttcccagtaaattactcttacc

SEQ ID NO: 73271 - DNA, 40 bp, Homo sapiens
ggtaagagtaatttactgggaaagccatgtgcaagaagtt

SEQ ID NO: 73272 - DNA, 40 bp, Homo sapiens
acttcttgcacatggctttcccagtaaattactcttacca

SEQ ID NO: 73273 - DNA, 40 bp, Homo sapiens
tggtaagagtaatttactgggaaagccatgtgcaagaagt

SEQ ID NO: 73274 - DNA, 40 bp, Homo sapiens
cttcttgcacatggctttcccagtaaattactcttaccaa

SEQ ID NO: 73275 - DNA, 40 bp, Homo sapiens
ttggtaagagtaatttactgggaaagccatgtgcaagaag

SEQ ID NO: 73276 - DNA, 40 bp, Homo sapiens
ttcttgcacatggctttcccagtaaattactcttaccaat

SEQ ID NO: 73277 - DNA, 40 bp, Homo sapiens
attggtaagagtaatttactgggaaagccatgtgcaagaa

SEQ ID NO: 73278 - DNA, 40 bp, Homo sapiens
tcttgcacatggctttcccagtaaattactcttaccaatg

SEQ ID NO: 73279 - DNA, 40 bp, Homo sapiens
cattggtaagagtaatttactgggaaagccatgtgcaaga

SEQ ID NO: 73280 - DNA, 40 bp, Homo sapiens
cttgcacatggctttcccagtaaattactcttaccaatgc

SEQ ID NO: 73281 - DNA, 40 bp, Homo sapiens
gcattggtaagagtaatttactgggaaagccatgtgcaag

SEQ ID NO: 73282 - DNA, 40 bp, Homo sapiens
ttgcacatggctttcccagtaaattactcttaccaatgca

SEQ ID NO: 73283 - DNA, 40 bp, Homo sapiens
tgcattggtaagagtaatttactgggaaagccatgtgcaa

SEQ ID NO: 73284 - DNA, 40 bp, Homo sapiens
tgcacatggctttcccagtaaattactcttaccaatgcaa

SEQ ID NO: 73285 - DNA, 40 bp, Homo sapiens
ttgcattggtaagagtaatttactgggaaagccatgtgca

SEQ ID NO: 73286 - DNA, 40 bp, Homo sapiens
gcacatggctttcccagtaaattactcttaccaatgcaac

SEQ ID NO: 73287 - DNA, 40 bp, Homo sapiens
gttgcattggtaagagtaatttactgggaaagccatgtgc

SEQ ID NO: 73288 - DNA, 40 bp, Homo sapiens
cacatggctttcccagtaaattactcttaccaatgcaaca

SEQ ID NO: 73289 - DNA, 40 bp, Homo sapiens
tgttgcattggtaagagtaatttactgggaaagccatgtg

SEQ ID NO: 73290 - DNA, 40 bp, Homo sapiens
acatggctttcccagtaaattactcttaccaatgcaacag

SEQ ID NO: 73291 - DNA, 40 bp, Homo sapiens
ctgttgcattggtaagagtaatttactgggaaagccatgt

SEQ ID NO: 73292 - DNA, 40 bp, Homo sapiens
catggctttcccagtaaattactcttaccaatgcaacaga

SEQ ID NO: 73293 - DNA, 40 bp, Homo sapiens
tctgttgcattggtaagagtaatttactgggaaagccatg

SEQ ID NO: 73294 - DNA, 40 bp, Homo sapiens
atggctttcccagtaaattactcttaccaatgcaacagac

SEQ ID NO: 73295 - DNA, 40 bp, Homo sapiens
gtctgttgcattggtaagagtaatttactgggaaagccat

SEQ ID NO: 73296 - DNA, 40 bp, Homo sapiens
tggctttcccagtaaattactcttaccaatgcaacagact

SEQ ID NO: 73297 - DNA, 40 bp, Homo sapiens
agtctgttgcattggtaagagtaatttactgggaaagcca

SEQ ID NO: 73298 - DNA, 40 bp, Homo sapiens
ggctttcccagtaaattactcttaccaatgcaacagactt

SEQ ID NO: 73299 - DNA, 40 bp, Homo sapiens
aagtctgttgcattggtaagagtaatttactgggaaagcc

SEQ ID NO: 73300 - DNA, 40 bp, Homo sapiens
gctttcccagtaaattactcttaccaatgcaacagacttt

SEQ ID NO: 73301 - DNA, 40 bp, Homo sapiens
aaagtctgttgcattggtaagagtaatttactgggaaagc

SEQ ID NO: 73302 - DNA, 40 bp, Homo sapiens
ctttcccagtaaattactcttaccaatgcaacagacttta

SEQ ID NO: 73303 - DNA, 40 bp, Homo sapiens
taaagtctgttgcattggtaagagtaatttactgggaaag

SEQ ID NO: 73304 - DNA, 40 bp, Homo sapiens
tttcccagtaaattactcttaccaatgcaacagactttaa

SEQ ID NO: 73305 - DNA, 40 bp, Homo sapiens
ttaaagtctgttgcattggtaagagtaatttactgggaaa

SEQ ID NO: 73306 - DNA, 40 bp, Homo sapiens
ttcccagtaaattactcttaccaatgcaacagactttaaa

SEQ ID NO: 73307 - DNA, 40 bp, Homo sapiens
tttaaagtctgttgcattggtaagagtaatttactgggaa

SEQ ID NO: 73308 - DNA, 40 bp, Homo sapiens
tcccagtaaattactcttaccaatgcaacagactttaaag

SEQ ID NO: 73309 - DNA, 40 bp, Homo sapiens
ctttaaagtctgttgcattggtaagagtaatttactggga

SEQ ID NO: 73310 - DNA, 40 bp, Homo sapiens
cccagtaaattactcttaccaatgcaacagactttaaaga

SEQ ID NO: 73311 - DNA, 40 bp, Homo sapiens
tctttaaagtctgttgcattggtaagagtaatttactggg

SEQ ID NO: 73312 - DNA, 40 bp, Homo sapiens
ccagtaaattactcttaccaatgcaacagactttaaagaa

SEQ ID NO: 73313 - DNA, 40 bp, Homo sapiens
ttctttaaagtctgttgcattggtaagagtaatttactgg

SEQ ID NO: 73314 - DNA, 40 bp, Homo sapiens
cagtaaattactcttaccaatgcaacagactttaaagaag

SEQ ID NO: 73315 - DNA, 40 bp, Homo sapiens
cttctttaaagtctgttgcattggtaagagtaatttactg

SEQ ID NO: 73316 - DNA, 40 bp, Homo sapiens
agtaaattactcttaccaatgcaacagactttaaagaagt

SEQ ID NO: 73317 - DNA, 40 bp, Homo sapiens
acttctttaaagtctgttgcattggtaagagtaatttact

SEQ ID NO: 73318 - DNA, 40 bp, Homo sapiens
gtaaattactcttaccaatgcaacagactttaaagaagtt

SEQ ID NO: 73319 - DNA, 40 bp, Homo sapiens
aacttctttaaagtctgttgcattggtaagagtaatttac

SEQ ID NO: 73320 - DNA, 40 bp, Homo sapiens
taaattactcttaccaatgcaacagactttaaagaagttg

SEQ ID NO: 73321 - DNA, 40 bp, Homo sapiens
caacttctttaaagtctgttgcattggtaagagtaattta

SEQ ID NO: 73322 - DNA, 40 bp, Homo sapiens
aaattactcttaccaatgcaacagactttaaagaagttgt

SEQ ID NO: 73323 - DNA, 40 bp, Homo sapiens
acaacttctttaaagtctgttgcattggtaagagtaattt

SEQ ID NO: 73324 - DNA, 40 bp, Homo sapiens
aattactcttaccaatgcaacagactttaaagaagttgtg

SEQ ID NO: 73325 - DNA, 40 bp, Homo sapiens
cacaacttctttaaagtctgttgcattggtaagagtaatt

SEQ ID NO: 73326 - DNA, 40 bp, Homo sapiens
attactcttaccaatgcaacagactttaaagaagttgtgt

SEQ ID NO: 73327 - DNA, 40 bp, Homo sapiens
acacaacttctttaaagtctgttgcattggtaagagtaat

SEQ ID NO: 73328 - DNA, 40 bp, Homo sapiens
ttactcttaccaatgcaacagactttaaagaagttgtgtt

SEQ ID NO: 73329 - DNA, 40 bp, Homo sapiens
aacacaacttctttaaagtctgttgcattggtaagagtaa

SEQ ID NO: 73330 - DNA, 40 bp, Homo sapiens
tactcttaccaatgcaacagactttaaagaagttgtgttt

SEQ ID NO: 73331 - DNA, 40 bp, Homo sapiens
aaacacaacttctttaaagtctgttgcattggtaagagta

SEQ ID NO: 73332 - DNA, 40 bp, Homo sapiens
actcttaccaatgcaacagactttaaagaagttgtgtttt

SEQ ID NO: 73333 - DNA, 40 bp, Homo sapiens
aaaacacaacttctttaaagtctgttgcattggtaagagt

SEQ ID NO: 73334 - DNA, 40 bp, Homo sapiens
ctcttaccaatgcaacagactttaaagaagttgtgtttta

SEQ ID NO: 73335 - DNA, 40 bp, Homo sapiens
taaaacacaacttctttaaagtctgttgcattggtaagag

SEQ ID NO: 73336 - DNA, 40 bp, Homo sapiens
tcttaccaatgcaacagactttaaagaagttgtgttttac

SEQ ID NO: 73337 - DNA, 40 bp, Homo sapiens
gtaaaacacaacttctttaaagtctgttgcattggtaaga

SEQ ID NO: 73338 - DNA, 40 bp, Homo sapiens
cttaccaatgcaacagactttaaagaagttgtgttttaca

SEQ ID NO: 73339 - DNA, 40 bp, Homo sapiens
tgtaaaacacaacttctttaaagtctgttgcattggtaag

SEQ ID NO: 73340 - DNA, 40 bp, Homo sapiens
ttaccaatgcaacagactttaaagaagttgtgttttacaa

SEQ ID NO: 73341 - DNA, 40 bp, Homo sapiens
ttgtaaaacacaacttctttaaagtctgttgcattggtaa

SEQ ID NO: 73342 - DNA, 40 bp, Homo sapiens
taccaatgcaacagactttaaagaagttgtgttttacaat

SEQ ID NO: 73343 - DNA, 40 bp, Homo sapiens
attgtaaaacacaacttctttaaagtctgttgcattggta

SEQ ID NO: 73344 - DNA, 40 bp, Homo sapiens
accaatgcaacagactttaaagaagttgtgttttacaatg

SEQ ID NO: 73345 - DNA, 40 bp, Homo sapiens
cattgtaaaacacaacttctttaaagtctgttgcattggt

SEQ ID NO: 73346 - DNA, 40 bp, Homo sapiens
ccaatgcaacagactttaaagaagttgtgttttacaatgc

SEQ ID NO: 73347 - DNA, 40 bp, Homo sapiens
gcattgtaaaacacaacttctttaaagtctgttgcattgg

SEQ ID NO: 73348 - DNA, 40 bp, Homo sapiens
caatgcaacagactttaaagaagttgtgttttacaatgca

SEQ ID NO: 73349 - DNA, 40 bp, Homo sapiens
tgcattgtaaaacacaacttctttaaagtctgttgcattg

SEQ ID NO: 73350 - DNA, 40 bp, Homo sapiens
aatgcaacagactttaaagaagttgtgttttacaatgcag

SEQ ID NO: 73351 - DNA, 40 bp, Homo sapiens
ctgcattgtaaaacacaacttctttaaagtctgttgcatt

SEQ ID NO: 73352 - DNA, 40 bp, Homo sapiens
atgcaacagactttaaagaagttgtgttttacaatgcaga

SEQ ID NO: 73353 - DNA, 40 bp, Homo sapiens
tctgcattgtaaaacacaacttctttaaagtctgttgcat

SEQ ID NO: 73354 - DNA, 40 bp, Homo sapiens
tgcaacagactttaaagaagttgtgttttacaatgcagag

SEQ ID NO: 73355 - DNA, 40 bp, Homo sapiens
ctctgcattgtaaaacacaacttctttaaagtctgttgca

SEQ ID NO: 73356 - DNA, 40 bp, Homo sapiens
gcaacagactttaaagaagttgtgttttacaatgcagaga

SEQ ID NO: 73357 - DNA, 40 bp, Homo sapiens
tctctgcattgtaaaacacaacttctttaaagtctgttgc

SEQ ID NO: 73358 - DNA, 40 bp, Homo sapiens
caacagactttaaagaagttgtgttttacaatgcagagag

SEQ ID NO: 73359 - DNA, 40 bp, Homo sapiens
ctctctgcattgtaaaacacaacttctttaaagtctgttg

SEQ ID NO: 73360 - DNA, 40 bp, Homo sapiens
aacagactttaaagaagttgtgttttacaatgcagagagt

SEQ ID NO: 73361 - DNA, 40 bp, Homo sapiens
actctctgcattgtaaaacacaacttctttaaagtctgtt

SEQ ID NO: 73362 - DNA, 40 bp, Homo sapiens
acagactttaaagaagttgtgttttacaatgcagagagtg

SEQ ID NO: 73363 - DNA, 40 bp, Homo sapiens
cactctctgcattgtaaaacacaacttctttaaagtctgt

SEQ ID NO: 73364 - DNA, 40 bp, Homo sapiens
cagactttaaagaagttgtgttttacaatgcagagagtgg

SEQ ID NO: 73365 - DNA, 40 bp, Homo sapiens
ccactctctgcattgtaaaacacaacttctttaaagtctg

SEQ ID NO: 73366 - DNA, 40 bp, Homo sapiens
agactttaaagaagttgtgttttacaatgcagagagtgga

SEQ ID NO: 73367 - DNA, 40 bp, Homo sapiens
tccactctctgcattgtaaaacacaacttctttaaagtct

SEQ ID NO: 73368 - DNA, 40 bp, Homo sapiens
gactttaaagaagttgtgttttacaatgcagagagtggag

SEQ ID NO: 73369 - DNA, 40 bp, Homo sapiens
ctccactctctgcattgtaaaacacaacttctttaaagtc

SEQ ID NO: 73370 - DNA, 40 bp, Homo sapiens
actttaaagaagttgtgttttacaatgcagagagtggagg

SEQ ID NO: 73371 - DNA, 40 bp, Homo sapiens
cctccactctctgcattgtaaaacacaacttctttaaagt

SEQ ID NO: 73372 - DNA, 40 bp, Homo sapiens
ctttaaagaagttgtgttttacaatgcagagagtggagga

SEQ ID NO: 73373 - DNA, 40 bp, Homo sapiens
tcctccactctctgcattgtaaaacacaacttctttaaag

SEQ ID NO: 73374 - DNA, 40 bp, Homo sapiens
tttaaagaagttgtgttttacaatgcagagagtggaggat

SEQ ID NO: 73375 - DNA, 40 bp, Homo sapiens
atcctccactctctgcattgtaaaacacaacttctttaaa

SEQ ID NO: 73376 - DNA, 40 bp, Homo sapiens
ttaaagaagttgtgttttacaatgcagagagtggaggatg

SEQ ID NO: 73377 - DNA, 40 bp, Homo sapiens
catcctccactctctgcattgtaaaacacaacttctttaa

SEQ ID NO: 73378 - DNA, 40 bp, Homo sapiens
taaagaagttgtgttttacaatgcagagagtggaggatgc

SEQ ID NO: 73379 - DNA, 40 bp, Homo sapiens
gcatcctccactctctgcattgtaaaacacaacttcttta

SEQ ID NO: 73380 - DNA, 40 bp, Homo sapiens
aaagaagttgtgttttacaatgcagagagtggaggatgct

SEQ ID NO: 73381 - DNA, 40 bp, Homo sapiens
agcatcctccactctctgcattgtaaaacacaacttcttt

SEQ ID NO: 73382 - DNA, 40 bp, Homo sapiens
aagaagttgtgttttacaatgcagagagtggaggatgctt

SEQ ID NO: 73383 - DNA, 40 bp, Homo sapiens
aagcatcctccactctctgcattgtaaaacacaacttctt

SEQ ID NO: 73384 - DNA, 40 bp, Homo sapiens
agaagttgtgttttacaatgcagagagtggaggatgcttt

SEQ ID NO: 73385 - DNA, 40 bp, Homo sapiens
aaagcatcctccactctctgcattgtaaaacacaacttct

SEQ ID NO: 73386 - DNA, 40 bp, Homo sapiens
gaagttgtgttttacaatgcagagagtggaggatgctttt

SEQ ID NO: 73387 - DNA, 40 bp, Homo sapiens
aaaagcatcctccactctctgcattgtaaaacacaacttc

SEQ ID NO: 73388 - DNA, 40 bp, Homo sapiens
aagttgtgttttacaatgcagagagtggaggatgcttttt

SEQ ID NO: 73389 - DNA, 40 bp, Homo sapiens
aaaaagcatcctccactctctgcattgtaaaacacaactt

SEQ ID NO: 73390 - DNA, 40 bp, Homo sapiens
agttgtgttttacaatgcagagagtggaggatgcttttta

SEQ ID NO: 73391 - DNA, 40 bp, Homo sapiens
taaaaagcatcctccactctctgcattgtaaaacacaact

SEQ ID NO: 73392 - DNA, 40 bp, Homo sapiens
gttgtgttttacaatgcagagagtggaggatgctttttat

SEQ ID NO: 73393 - DNA, 40 bp, Homo sapiens
ataaaaagcatcctccactctctgcattgtaaaacacaac

SEQ ID NO: 73394 - DNA, 40 bp, Homo sapiens
ttgtgttttacaatgcagagagtggaggatgctttttata

SEQ ID NO: 73395 - DNA, 40 bp, Homo sapiens
tataaaaagcatcctccactctctgcattgtaaaacacaa

SEQ ID NO: 73396 - DNA, 40 bp, Homo sapiens
tgtgttttacaatgcagagagtggaggatgctttttatac

SEQ ID NO: 73397 - DNA, 40 bp, Homo sapiens
gtataaaaagcatcctccactctctgcattgtaaaacaca

SEQ ID NO: 73398 - DNA, 40 bp, Homo sapiens
gtgttttacaatgcagagagtggaggatgctttttataca

SEQ ID NO: 73399 - DNA, 40 bp, Homo sapiens
tgtataaaaagcatcctccactctctgcattgtaaaacac

SEQ ID NO: 73400 - DNA, 40 bp, Homo sapiens
tgttttacaatgcagagagtggaggatgctttttatacat

SEQ ID NO: 73401 - DNA, 40 bp, Homo sapiens
atgtataaaaagcatcctccactctctgcattgtaaaaca

SEQ ID NO: 73402 - DNA, 40 bp, Homo sapiens
gttttacaatgcagagagtggaggatgctttttatacatt

SEQ ID NO: 73403 - DNA, 40 bp, Homo sapiens
aatgtataaaaagcatcctccactctctgcattgtaaaac

SEQ ID NO: 73404 - DNA, 40 bp, Homo sapiens
ttttacaatgcagagagtggaggatgctttttatacattg

SEQ ID NO: 73405 - DNA, 40 bp, Homo sapiens
caatgtataaaaagcatcctccactctctgcattgtaaaa

SEQ ID NO: 73406 - DNA, 40 bp, Homo sapiens
tttacaatgcagagagtggaggatgctttttatacattgg

SEQ ID NO: 73407 - DNA, 40 bp, Homo sapiens
ccaatgtataaaaagcatcctccactctctgcattgtaaa

SEQ ID NO: 73408 - DNA, 40 bp, Homo sapiens
ttacaatgcagagagtggaggatgctttttatacattggt

SEQ ID NO: 73409 - DNA, 40 bp, Homo sapiens
accaatgtataaaaagcatcctccactctctgcattgtaa

SEQ ID NO: 73410 - DNA, 40 bp, Homo sapiens
tacaatgcagagagtggaggatgctttttatacattggtg

SEQ ID NO: 73411 - DNA, 40 bp, Homo sapiens
caccaatgtataaaaagcatcctccactctctgcattgta

SEQ ID NO: 73412 - DNA, 40 bp, Homo sapiens
acaatgcagagagtggaggatgctttttatacattggtga

SEQ ID NO: 73413 - DNA, 40 bp, Homo sapiens
tcaccaatgtataaaaagcatcctccactctctgcattgt

SEQ ID NO: 73414 - DNA, 40 bp, Homo sapiens
caatgcagagagtggaggatgctttttatacattggtgag

SEQ ID NO: 73415 - DNA, 40 bp, Homo sapiens
ctcaccaatgtataaaaagcatcctccactctctgcattg

SEQ ID NO: 73416 - DNA, 40 bp, Homo sapiens
aatgcagagagtggaggatgctttttatacattggtgagg

SEQ ID NO: 73417 - DNA, 40 bp, Homo sapiens
cctcaccaatgtataaaaagcatcctccactctctgcatt

SEQ ID NO: 73418 - DNA, 40 bp, Homo sapiens
atgcagagagtggaggatgctttttatacattggtgaggg

SEQ ID NO: 73419 - DNA, 40 bp, Homo sapiens
ccctcaccaatgtataaaaagcatcctccactctctgcat

SEQ ID NO: 73420 - DNA, 40 bp, Homo sapiens
tgcagagagtggaggatgctttttatacattggtgaggga

SEQ ID NO: 73421 - DNA, 40 bp, Homo sapiens
tccctcaccaatgtataaaaagcatcctccactctctgca

SEQ ID NO: 73422 - DNA, 40 bp, Homo sapiens
gcagagagtggaggatgctttttatacattggtgagggag

SEQ ID NO: 73423 - DNA, 40 bp, Homo sapiens
ctccctcaccaatgtataaaaagcatcctccactctctgc

SEQ ID NO: 73424 - DNA, 40 bp, Homo sapiens
cagagagtggaggatgctttttatacattggtgagggaga

SEQ ID NO: 73425 - DNA, 40 bp, Homo sapiens
tctccctcaccaatgtataaaaagcatcctccactctctg

SEQ ID NO: 73426 - DNA, 40 bp, Homo sapiens
agagagtggaggatgctttttatacattggtgagggagat

SEQ ID NO: 73427 - DNA, 40 bp, Homo sapiens
atctccctcaccaatgtataaaaagcatcctccactctct

SEQ ID NO: 73428 - DNA, 40 bp, Homo sapiens
gagagtggaggatgctttttatacattggtgagggagatc

SEQ ID NO: 73429 - DNA, 40 bp, Homo sapiens
gatctccctcaccaatgtataaaaagcatcctccactctc

SEQ ID NO: 73430 - DNA, 40 bp, Homo sapiens
agagtggaggatgctttttatacattggtgagggagatcc

SEQ ID NO: 73431 - DNA, 40 bp, Homo sapiens
ggatctccctcaccaatgtataaaaagcatcctccactct

SEQ ID NO: 73432 - DNA, 40 bp, Homo sapiens
gagtggaggatgctttttatacattggtgagggagatccg

SEQ ID NO: 73433 - DNA, 40 bp, Homo sapiens
cggatctccctcaccaatgtataaaaagcatcctccactc

SEQ ID NO: 73434 - DNA, 40 bp, Homo sapiens
agtggaggatgctttttatacattggtgagggagatccga

SEQ ID NO: 73435 - DNA, 40 bp, Homo sapiens
tcggatctccctcaccaatgtataaaaagcatcctccact

SEQ ID NO: 73436 - DNA, 40 bp, Homo sapiens
gtggaggatgctttttatacattggtgagggagatccgac

SEQ ID NO: 73437 - DNA, 40 bp, Homo sapiens
gtcggatctccctcaccaatgtataaaaagcatcctccac

SEQ ID NO: 73438 - DNA, 40 bp, Homo sapiens
tggaggatgctttttatacattggtgagggagatccgaca

SEQ ID NO: 73439 - DNA, 40 bp, Homo sapiens
tgtcggatctccctcaccaatgtataaaaagcatcctcca

SEQ ID NO: 73440 - DNA, 40 bp, Homo sapiens
ggaggatgctttttatacattggtgagggagatccgacaa

SEQ ID NO: 73441 - DNA, 40 bp, Homo sapiens
ttgtcggatctccctcaccaatgtataaaaagcatcctcc

SEQ ID NO: 73442 - DNA, 40 bp, Homo sapiens
gaggatgctttttatacattggtgagggagatccgacaat

SEQ ID NO: 73443 - DNA, 40 bp, Homo sapiens
attgtcggatctccctcaccaatgtataaaaagcatcctc

SEQ ID NO: 73444 - DNA, 40 bp, Homo sapiens
aggatgctttttatacattggtgagggagatccgacaata

SEQ ID NO: 73445 - DNA, 40 bp, Homo sapiens
tattgtcggatctccctcaccaatgtataaaaagcatcct

SEQ ID NO: 73446 - DNA, 40 bp, Homo sapiens
ggatgctttttatacattggtgagggagatccgacaatac

SEQ ID NO: 73447 - DNA, 40 bp, Homo sapiens
gtattgtcggatctccctcaccaatgtataaaaagcatcc

SEQ ID NO: 73448 - DNA, 40 bp, Homo sapiens
gatgctttttatacattggtgagggagatccgacaataca

SEQ ID NO: 73449 - DNA, 40 bp, Homo sapiens
tgtattgtcggatctccctcaccaatgtataaaaagcatc

SEQ ID NO: 73450 - DNA, 40 bp, Homo sapiens
atgctttttatacattggtgagggagatccgacaatacag

SEQ ID NO: 73451 - DNA, 40 bp, Homo sapiens
ctgtattgtcggatctccctcaccaatgtataaaaagcat

SEQ ID NO: 73452 - DNA, 40 bp, Homo sapiens
tgctttttatacattggtgagggagatccgacaatacaga

SEQ ID NO: 73453 - DNA, 40 bp, Homo sapiens
tctgtattgtcggatctccctcaccaatgtataaaaagca

SEQ ID NO: 73454 - DNA, 40 bp, Homo sapiens
gctttttatacattggtgagggagatccgacaatacagat

SEQ ID NO: 73455 - DNA, 40 bp, Homo sapiens
atctgtattgtcggatctccctcaccaatgtataaaaagc

SEQ ID NO: 73456 - DNA, 40 bp, Homo sapiens
ctttttatacattggtgagggagatccgacaatacagatt

SEQ ID NO: 73457 - DNA, 40 bp, Homo sapiens
aatctgtattgtcggatctccctcaccaatgtataaaaag

SEQ ID NO: 73458 - DNA, 40 bp, Homo sapiens
tttttatacattggtgagggagatccgacaatacagattg

SEQ ID NO: 73459 - DNA, 40 bp, Homo sapiens
caatctgtattgtcggatctccctcaccaatgtataaaaa

SEQ ID NO: 73460 - DNA, 40 bp, Homo sapiens
ttttatacattggtgagggagatccgacaatacagattga

SEQ ID NO: 73461 - DNA, 40 bp, Homo sapiens
tcaatctgtattgtcggatctccctcaccaatgtataaaa

SEQ ID NO: 73462 - DNA, 40 bp, Homo sapiens
tttatacattggtgagggagatccgacaatacagattgaa

SEQ ID NO: 73463 - DNA, 40 bp, Homo sapiens
ttcaatctgtattgtcggatctccctcaccaatgtataaa

SEQ ID NO: 73464 - DNA, 40 bp, Homo sapiens
ttatacattggtgagggagatccgacaatacagattgaaa

SEQ ID NO: 73465 - DNA, 40 bp, Homo sapiens
tttcaatctgtattgtcggatctccctcaccaatgtataa

SEQ ID NO: 73466 - DNA, 40 bp, Homo sapiens
tatacattggtgagggagatccgacaatacagattgaaaa

SEQ ID NO: 73467 - DNA, 40 bp, Homo sapiens
ttttcaatctgtattgtcggatctccctcaccaatgtata

SEQ ID NO: 73468 - DNA, 40 bp, Homo sapiens
atacattggtgagggagatccgacaatacagattgaaaaa

SEQ ID NO: 73469 - DNA, 40 bp, Homo sapiens
tttttcaatctgtattgtcggatctccctcaccaatgtat

SEQ ID NO: 73470 - DNA, 40 bp, Homo sapiens
tacattggtgagggagatccgacaatacagattgaaaaaa

SEQ ID NO: 73471 - DNA, 40 bp, Homo sapiens
ttttttcaatctgtattgtcggatctccctcaccaatgta

SEQ ID NO: 73472 - DNA, 40 bp, Homo sapiens
acattggtgagggagatccgacaatacagattgaaaaaaa

SEQ ID NO: 73473 - DNA, 40 bp, Homo sapiens
tttttttcaatctgtattgtcggatctccctcaccaatgt

SEQ ID NO: 73474 - DNA, 40 bp, Homo sapiens
cattggtgagggagatccgacaatacagattgaaaaaaat

SEQ ID NO: 73475 - DNA, 40 bp, Homo sapiens
atttttttcaatctgtattgtcggatctccctcaccaatg

SEQ ID NO: 73476 - DNA, 40 bp, Homo sapiens
attggtgagggagatccgacaatacagattgaaaaaaatc

SEQ ID NO: 73477 - DNA, 40 bp, Homo sapiens
gatttttttcaatctgtattgtcggatctccctcaccaat

SEQ ID NO: 73478 - DNA, 40 bp, Homo sapiens
ttggtgagggagatccgacaatacagattgaaaaaaatca

SEQ ID NO: 73479 - DNA, 40 bp, Homo sapiens
tgatttttttcaatctgtattgtcggatctccctcaccaa

SEQ ID NO: 73480 - DNA, 40 bp, Homo sapiens
tggtgagggagatccgacaatacagattgaaaaaaatcag

SEQ ID NO: 73481 - DNA, 40 bp, Homo sapiens
ctgatttttttcaatctgtattgtcggatctccctcacca

SEQ ID NO: 73482 - DNA, 40 bp, Homo sapiens
ggtgagggagatccgacaatacagattgaaaaaaatcagc

SEQ ID NO: 73483 - DNA, 40 bp, Homo sapiens
gctgatttttttcaatctgtattgtcggatctccctcacc

SEQ ID NO: 73484 - DNA, 40 bp, Homo sapiens
gtgagggagatccgacaatacagattgaaaaaaatcagca

SEQ ID NO: 73485 - DNA, 40 bp, Homo sapiens
tgctgatttttttcaatctgtattgtcggatctccctcac

SEQ ID NO: 73486 - DNA, 40 bp, Homo sapiens
tgagggagatccgacaatacagattgaaaaaaatcagcaa

SEQ ID NO: 73487 - DNA, 40 bp, Homo sapiens
ttgctgatttttttcaatctgtattgtcggatctccctca

SEQ ID NO: 73488 - DNA, 40 bp, Homo sapiens
gagggagatccgacaatacagattgaaaaaaatcagcaaa

SEQ ID NO: 73489 - DNA, 40 bp, Homo sapiens
tttgctgatttttttcaatctgtattgtcggatctccctc

SEQ ID NO: 73490 - DNA, 40 bp, Homo sapiens
agggagatccgacaatacagattgaaaaaaatcagcaaag

SEQ ID NO: 73491 - DNA, 40 bp, Homo sapiens
ctttgctgatttttttcaatctgtattgtcggatctccct

SEQ ID NO: 73492 - DNA, 40 bp, Homo sapiens
gggagatccgacaatacagattgaaaaaaatcagcaaaga

SEQ ID NO: 73493 - DNA, 40 bp, Homo sapiens
tctttgctgatttttttcaatctgtattgtcggatctccc

SEQ ID NO: 73494 - DNA, 40 bp, Homo sapiens
ggagatccgacaatacagattgaaaaaaatcagcaaagaa

SEQ ID NO: 73495 - DNA, 40 bp, Homo sapiens
ttctttgctgatttttttcaatctgtattgtcggatctcc

SEQ ID NO: 73496 - DNA, 40 bp, Homo sapiens
gagatccgacaatacagattgaaaaaaatcagcaaagaag

SEQ ID NO: 73497 - DNA, 40 bp, Homo sapiens
cttctttgctgatttttttcaatctgtattgtcggatctc

SEQ ID NO: 73498 - DNA, 40 bp, Homo sapiens
agatccgacaatacagattgaaaaaaatcagcaaagaaga

SEQ ID NO: 73499 - DNA, 40 bp, Homo sapiens
tcttctttgctgatttttttcaatctgtattgtcggatct

SEQ ID NO: 73500 - DNA, 40 bp, Homo sapiens
gatccgacaatacagattgaaaaaaatcagcaaagaagaa

SEQ ID NO: 73501 - DNA, 40 bp, Homo sapiens
ttcttctttgctgatttttttcaatctgtattgtcggatc

SEQ ID NO: 73502 - DNA, 40 bp, Homo sapiens
atccgacaatacagattgaaaaaaatcagcaaagaagaaa

SEQ ID NO: 73503 - DNA, 40 bp, Homo sapiens
tttcttctttgctgatttttttcaatctgtattgtcggat

SEQ ID NO: 73504 - DNA, 40 bp, Homo sapiens
tccgacaatacagattgaaaaaaatcagcaaagaagaaaa

SEQ ID NO: 73505 - DNA, 40 bp, Homo sapiens
ttttcttctttgctgatttttttcaatctgtattgtcgga

SEQ ID NO: 73506 - DNA, 40 bp, Homo sapiens
ccgacaatacagattgaaaaaaatcagcaaagaagaaaag

SEQ ID NO: 73507 - DNA, 40 bp, Homo sapiens
cttttcttctttgctgatttttttcaatctgtattgtcgg

SEQ ID NO: 73508 - DNA, 40 bp, Homo sapiens
cgacaatacagattgaaaaaaatcagcaaagaagaaaaga

SEQ ID NO: 73509 - DNA, 40 bp, Homo sapiens
tcttttcttctttgctgatttttttcaatctgtattgtcg

SEQ ID NO: 73510 - DNA, 40 bp, Homo sapiens
gacaatacagattgaaaaaaatcagcaaagaagaaaagac

SEQ ID NO: 73511 - DNA, 40 bp, Homo sapiens
gtcttttcttctttgctgatttttttcaatctgtattgtc

SEQ ID NO: 73512 - DNA, 40 bp, Homo sapiens
acaatacagattgaaaaaaatcagcaaagaagaaaagact

SEQ ID NO: 73513 - DNA, 40 bp, Homo sapiens
agtcttttcttctttgctgatttttttcaatctgtattgt

SEQ ID NO: 73514 - DNA, 40 bp, Homo sapiens
caatacagattgaaaaaaatcagcaaagaagaaaagactc

SEQ ID NO: 73515 - DNA, 40 bp, Homo sapiens
gagtcttttcttctttgctgatttttttcaatctgtattg

SEQ ID NO: 73516 - DNA, 40 bp, Homo sapiens
aatacagattgaaaaaaatcagcaaagaagaaaagactcc

SEQ ID NO: 73517 - DNA, 40 bp, Homo sapiens
ggagtcttttcttctttgctgatttttttcaatctgtatt

SEQ ID NO: 73518 - DNA, 40 bp, Homo sapiens
atacagattgaaaaaaatcagcaaagaagaaaagactcct

SEQ ID NO: 73519 - DNA, 40 bp, Homo sapiens
aggagtcttttcttctttgctgatttttttcaatctgtat

SEQ ID NO: 73520 - DNA, 40 bp, Homo sapiens
tacagattgaaaaaaatcagcaaagaagaaaagactcctg

SEQ ID NO: 73521 - DNA, 40 bp, Homo sapiens
caggagtcttttcttctttgctgatttttttcaatctgta

SEQ ID NO: 73522 - DNA, 40 bp, Homo sapiens
acagattgaaaaaaatcagcaaagaagaaaagactcctgg

SEQ ID NO: 73523 - DNA, 40 bp, Homo sapiens
ccaggagtcttttcttctttgctgatttttttcaatctgt

SEQ ID NO: 73524 - DNA, 40 bp, Homo sapiens
cagattgaaaaaaatcagcaaagaagaaaagactcctggc

SEQ ID NO: 73525 - DNA, 40 bp, Homo sapiens
gccaggagtcttttcttctttgctgatttttttcaatctg

SEQ ID NO: 73526 - DNA, 40 bp, Homo sapiens
agattgaaaaaaatcagcaaagaagaaaagactcctggct

SEQ ID NO: 73527 - DNA, 40 bp, Homo sapiens
agccaggagtcttttcttctttgctgatttttttcaatct

SEQ ID NO: 73528 - DNA, 40 bp, Homo sapiens
gattgaaaaaaatcagcaaagaagaaaagactcctggctg

SEQ ID NO: 73529 - DNA, 40 bp, Homo sapiens
cagccaggagtcttttcttctttgctgatttttttcaatc

SEQ ID NO: 73530 - DNA, 40 bp, Homo sapiens
attgaaaaaaatcagcaaagaagaaaagactcctggctgt

SEQ ID NO: 73531 - DNA, 40 bp, Homo sapiens
acagccaggagtcttttcttctttgctgatttttttcaat

SEQ ID NO: 73532 - DNA, 40 bp, Homo sapiens
ttgaaaaaaatcagcaaagaagaaaagactcctggctgtg

SEQ ID NO: 73533 - DNA, 40 bp, Homo sapiens
cacagccaggagtcttttcttctttgctgatttttttcaa

SEQ ID NO: 73534 - DNA, 40 bp, Homo sapiens
tgaaaaaaatcagcaaagaagaaaagactcctggctgtgt

SEQ ID NO: 73535 - DNA, 40 bp, Homo sapiens
acacagccaggagtcttttcttctttgctgatttttttca

SEQ ID NO: 73536 - DNA, 40 bp, Homo sapiens
gaaaaaaatcagcaaagaagaaaagactcctggctgtgtg

SEQ ID NO: 73537 - DNA, 40 bp, Homo sapiens
cacacagccaggagtcttttcttctttgctgatttttttc

SEQ ID NO: 73538 - DNA, 40 bp, Homo sapiens
aaaaaaatcagcaaagaagaaaagactcctggctgtgtga

SEQ ID NO: 73539 - DNA, 40 bp, Homo sapiens
tcacacagccaggagtcttttcttctttgctgattttttt

SEQ ID NO: 73540 - DNA, 40 bp, Homo sapiens
aaaaaatcagcaaagaagaaaagactcctggctgtgtgaa

SEQ ID NO: 73541 - DNA, 40 bp, Homo sapiens
ttcacacagccaggagtcttttcttctttgctgatttttt

SEQ ID NO: 73542 - DNA, 40 bp, Homo sapiens
aaaaatcagcaaagaagaaaagactcctggctgtgtgaaa

SEQ ID NO: 73543 - DNA, 40 bp, Homo sapiens
tttcacacagccaggagtcttttcttctttgctgattttt

SEQ ID NO: 73544 - DNA, 40 bp, Homo sapiens
aaaatcagcaaagaagaaaagactcctggctgtgtgaaaa

SEQ ID NO: 73545 - DNA, 40 bp, Homo sapiens
ttttcacacagccaggagtcttttcttctttgctgatttt

SEQ ID NO: 73546 - DNA, 40 bp, Homo sapiens
aaatcagcaaagaagaaaagactcctggctgtgtgaaaat

SEQ ID NO: 73547 - DNA, 40 bp, Homo sapiens
attttcacacagccaggagtcttttcttctttgctgattt

SEQ ID NO: 73548 - DNA, 40 bp, Homo sapiens
aatcagcaaagaagaaaagactcctggctgtgtgaaaatt

SEQ ID NO: 73549 - DNA, 40 bp, Homo sapiens
aattttcacacagccaggagtcttttcttctttgctgatt

SEQ ID NO: 73550 - DNA, 40 bp, Homo sapiens
atcagcaaagaagaaaagactcctggctgtgtgaaaatta

SEQ ID NO: 73551 - DNA, 40 bp, Homo sapiens
taattttcacacagccaggagtcttttcttctttgctgat

SEQ ID NO: 73552 - DNA, 40 bp, Homo sapiens
tcagcaaagaagaaaagactcctggctgtgtgaaaattaa

SEQ ID NO: 73553 - DNA, 40 bp, Homo sapiens
ttaattttcacacagccaggagtcttttcttctttgctga

SEQ ID NO: 73554 - DNA, 40 bp, Homo sapiens
cagcaaagaagaaaagactcctggctgtgtgaaaattaaa

SEQ ID NO: 73555 - DNA, 40 bp, Homo sapiens
tttaattttcacacagccaggagtcttttcttctttgctg

SEQ ID NO: 73556 - DNA, 40 bp, Homo sapiens
agcaaagaagaaaagactcctggctgtgtgaaaattaaaa

SEQ ID NO: 73557 - DNA, 40 bp, Homo sapiens
ttttaattttcacacagccaggagtcttttcttctttgct

SEQ ID NO: 73558 - DNA, 40 bp, Homo sapiens
gcaaagaagaaaagactcctggctgtgtgaaaattaaaaa

SEQ ID NO: 73559 - DNA, 40 bp, Homo sapiens
tttttaattttcacacagccaggagtcttttcttctttgc

SEQ ID NO: 73560 - DNA, 40 bp, Homo sapiens
caaagaagaaaagactcctggctgtgtgaaaattaaaaaa

SEQ ID NO: 73561 - DNA, 40 bp, Homo sapiens
ttttttaattttcacacagccaggagtcttttcttctttg

SEQ ID NO: 73562 - DNA, 40 bp, Homo sapiens
aaagaagaaaagactcctggctgtgtgaaaattaaaaaat

SEQ ID NO: 73563 - DNA, 40 bp, Homo sapiens
attttttaattttcacacagccaggagtcttttcttcttt

SEQ ID NO: 73564 - DNA, 40 bp, Homo sapiens
aagaagaaaagactcctggctgtgtgaaaattaaaaaatg

SEQ ID NO: 73565 - DNA, 40 bp, Homo sapiens
cattttttaattttcacacagccaggagtcttttcttctt

SEQ ID NO: 73566 - DNA, 40 bp, Homo sapiens
agaagaaaagactcctggctgtgtgaaaattaaaaaatgc

SEQ ID NO: 73567 - DNA, 40 bp, Homo sapiens
gcattttttaattttcacacagccaggagtcttttcttct

SEQ ID NO: 73568 - DNA, 40 bp, Homo sapiens
gaagaaaagactcctggctgtgtgaaaattaaaaaatgca

SEQ ID NO: 73569 - DNA, 40 bp, Homo sapiens
tgcattttttaattttcacacagccaggagtcttttcttc

SEQ ID NO: 73570 - DNA, 40 bp, Homo sapiens
aagaaaagactcctggctgtgtgaaaattaaaaaatgcat

SEQ ID NO: 73571 - DNA, 40 bp, Homo sapiens
atgcattttttaattttcacacagccaggagtcttttctt

SEQ ID NO: 73572 - DNA, 40 bp, Homo sapiens
agaaaagactcctggctgtgtgaaaattaaaaaatgcatt

SEQ ID NO: 73573 - DNA, 40 bp, Homo sapiens
aatgcattttttaattttcacacagccaggagtcttttct

SEQ ID NO: 73574 - DNA, 40 bp, Homo sapiens
gaaaagactcctggctgtgtgaaaattaaaaaatgcatta

SEQ ID NO: 73575 - DNA, 40 bp, Homo sapiens
taatgcattttttaattttcacacagccaggagtcttttc

SEQ ID NO: 73576 - DNA, 40 bp, Homo sapiens
aaaagactcctggctgtgtgaaaattaaaaaatgcattat

SEQ ID NO: 73577 - DNA, 40 bp, Homo sapiens
ataatgcattttttaattttcacacagccaggagtctttt

SEQ ID NO: 73578 - DNA, 40 bp, Homo sapiens
aaagactcctggctgtgtgaaaattaaaaaatgcattata

SEQ ID NO: 73579 - DNA, 40 bp, Homo sapiens
tataatgcattttttaattttcacacagccaggagtcttt

SEQ ID NO: 73580 - DNA, 40 bp, Homo sapiens
aagactcctggctgtgtgaaaattaaaaaatgcattataa

SEQ ID NO: 73581 - DNA, 40 bp, Homo sapiens
ttataatgcattttttaattttcacacagccaggagtctt

SEQ ID NO: 73582 - DNA, 40 bp, Homo sapiens
agactcctggctgtgtgaaaattaaaaaatgcattataat

SEQ ID NO: 73583 - DNA, 40 bp, Homo sapiens
attataatgcattttttaattttcacacagccaggagtct

SEQ ID NO: 73584 - DNA, 40 bp, Homo sapiens
gactcctggctgtgtgaaaattaaaaaatgcattataatg

SEQ ID NO: 73585 - DNA, 40 bp, Homo sapiens
cattataatgcattttttaattttcacacagccaggagtc

SEQ ID NO: 73586 - DNA, 40 bp, Homo sapiens
actcctggctgtgtgaaaattaaaaaatgcattataatgt

SEQ ID NO: 73587 - DNA, 40 bp, Homo sapiens
acattataatgcattttttaattttcacacagccaggagt

SEQ ID NO: 73588 - DNA, 40 bp, Homo sapiens
ctcctggctgtgtgaaaattaaaaaatgcattataatgta

SEQ ID NO: 73589 - DNA, 40 bp, Homo sapiens
tacattataatgcattttttaattttcacacagccaggag

SEQ ID NO: 73590 - DNA, 40 bp, Homo sapiens
tcctggctgtgtgaaaattaaaaaatgcattataatgtaa

SEQ ID NO: 73591 - DNA, 40 bp, Homo sapiens
ttacattataatgcattttttaattttcacacagccagga

SEQ ID NO: 73592 - DNA, 40 bp, Homo sapiens
cctggctgtgtgaaaattaaaaaatgcattataatgtaat

SEQ ID NO: 73593 - DNA, 40 bp, Homo sapiens
attacattataatgcattttttaattttcacacagccagg

SEQ ID NO: 73594 - DNA, 40 bp, Homo sapiens
ctggctgtgtgaaaattaaaaaatgcattataatgtaatc

SEQ ID NO: 73595 - DNA, 40 bp, Homo sapiens
gattacattataatgcattttttaattttcacacagccag

SEQ ID NO: 73596 - DNA, 40 bp, Homo sapiens
tggctgtgtgaaaattaaaaaatgcattataatgtaatct

SEQ ID NO: 73597 - DNA, 40 bp, Homo sapiens
agattacattataatgcattttttaattttcacacagcca

SEQ ID NO: 73598 - DNA, 40 bp, Homo sapiens
ggctgtgtgaaaattaaaaaatgcattataatgtaatctg

SEQ ID NO: 73599 - DNA, 40 bp, Homo sapiens
cagattacattataatgcattttttaattttcacacagcc

SEQ ID NO: 73600 - DNA, 40 bp, Homo sapiens
gctgtgtgaaaattaaaaaatgcattataatgtaatctgg

SEQ ID NO: 73601 - DNA, 40 bp, Homo sapiens
ccagattacattataatgcattttttaattttcacacagc

SEQ ID NO: 73602 - DNA, 40 bp, Homo sapiens
ctgtgtgaaaattaaaaaatgcattataatgtaatctggt

SEQ ID NO: 73603 - DNA, 40 bp, Homo sapiens
accagattacattataatgcattttttaattttcacacag

SEQ ID NO: 73604 - DNA, 40 bp, Homo sapiens
tgtgtgaaaattaaaaaatgcattataatgtaatctggta

SEQ ID NO: 73605 - DNA, 40 bp, Homo sapiens
taccagattacattataatgcattttttaattttcacaca

SEQ ID NO: 73606 - DNA, 40 bp, Homo sapiens
gtgtgaaaattaaaaaatgcattataatgtaatctggtaa

SEQ ID NO: 73607 - DNA, 40 bp, Homo sapiens
ttaccagattacattataatgcattttttaattttcacac

SEQ ID NO: 73608 - DNA, 40 bp, Homo sapiens
tgtgaaaattaaaaaatgcattataatgtaatctggtaag

SEQ ID NO: 73609 - DNA, 40 bp, Homo sapiens
cttaccagattacattataatgcattttttaattttcaca

SEQ ID NO: 73610 - DNA, 40 bp, Homo sapiens
gtgaaaattaaaaaatgcattataatgtaatctggtaagt

SEQ ID NO: 73611 - DNA, 40 bp, Homo sapiens
acttaccagattacattataatgcattttttaattttcac

SEQ ID NO: 73612 - DNA, 40 bp, Homo sapiens
tgaaaattaaaaaatgcattataatgtaatctggtaagtt

SEQ ID NO: 73613 - DNA, 40 bp, Homo sapiens
aacttaccagattacattataatgcattttttaattttca

SEQ ID NO: 73614 - DNA, 40 bp, Homo sapiens
gaaaattaaaaaatgcattataatgtaatctggtaagttt

SEQ ID NO: 73615 - DNA, 40 bp, Homo sapiens
aaacttaccagattacattataatgcattttttaattttc

SEQ ID NO: 73616 - DNA, 40 bp, Homo sapiens
aaaattaaaaaatgcattataatgtaatctggtaagttta

SEQ ID NO: 73617 - DNA, 40 bp, Homo sapiens
taaacttaccagattacattataatgcattttttaatttt

SEQ ID NO: 73618 - DNA, 40 bp, Homo sapiens
aaattaaaaaatgcattataatgtaatctggtaagtttaa

SEQ ID NO: 73619 - DNA, 40 bp, Homo sapiens
ttaaacttaccagattacattataatgcattttttaattt

SEQ ID NO: 73620 - DNA, 40 bp, Homo sapiens
aattaaaaaatgcattataatgtaatctggtaagtttaag

SEQ ID NO: 73621 - DNA, 40 bp, Homo sapiens
cttaaacttaccagattacattataatgcattttttaatt

SEQ ID NO: 73622 - DNA, 40 bp, Homo sapiens
attaaaaaatgcattataatgtaatctggtaagtttaagt

SEQ ID NO: 73623 - DNA, 40 bp, Homo sapiens
acttaaacttaccagattacattataatgcattttttaat

SEQ ID NO: 73624 - DNA, 40 bp, Homo sapiens
ttaaaaaatgcattataatgtaatctggtaagtttaagtt

SEQ ID NO: 73625 - DNA, 40 bp, Homo sapiens
aacttaaacttaccagattacattataatgcattttttaa

SEQ ID NO: 73626 - DNA, 40 bp, Homo sapiens
taaaaaatgcattataatgtaatctggtaagtttaagttc

SEQ ID NO: 73627 - DNA, 40 bp, Homo sapiens
gaacttaaacttaccagattacattataatgcatttttta

SEQ ID NO: 73628 - DNA, 40 bp, Homo sapiens
aaaaaatgcattataatgtaatctggtaagtttaagttca

SEQ ID NO: 73629 - DNA, 40 bp, Homo sapiens
tgaacttaaacttaccagattacattataatgcatttttt

SEQ ID NO: 73630 - DNA, 40 bp, Homo sapiens
aaaaatgcattataatgtaatctggtaagtttaagttcag

SEQ ID NO: 73631 - DNA, 40 bp, Homo sapiens
ctgaacttaaacttaccagattacattataatgcattttt

SEQ ID NO: 73632 - DNA, 40 bp, Homo sapiens
aaaatgcattataatgtaatctggtaagtttaagttcagc

SEQ ID NO: 73633 - DNA, 40 bp, Homo sapiens
gctgaacttaaacttaccagattacattataatgcatttt

SEQ ID NO: 73634 - DNA, 40 bp, Homo sapiens
aaatgcattataatgtaatctggtaagtttaagttcagca

SEQ ID NO: 73635 - DNA, 40 bp, Homo sapiens
tgctgaacttaaacttaccagattacattataatgcattt

SEQ ID NO: 73636 - DNA, 40 bp, Homo sapiens
aatgcattataatgtaatctggtaagtttaagttcagcac

SEQ ID NO: 73637 - DNA, 40 bp, Homo sapiens
gtgctgaacttaaacttaccagattacattataatgcatt

SEQ ID NO: 73638 - DNA, 40 bp, Homo sapiens
atgcattataatgtaatctggtaagtttaagttcagcaca

SEQ ID NO: 73639 - DNA, 40 bp, Homo sapiens
tgtgctgaacttaaacttaccagattacattataatgcat

SEQ ID NO: 73640 - DNA, 40 bp, Homo sapiens
tgcattataatgtaatctggtaagtttaagttcagcacat

SEQ ID NO: 73641 - DNA, 40 bp, Homo sapiens
atgtgctgaacttaaacttaccagattacattataatgca

SEQ ID NO: 73642 - DNA, 40 bp, Homo sapiens
gcattataatgtaatctggtaagtttaagttcagcacatt

SEQ ID NO: 73643 - DNA, 40 bp, Homo sapiens
aatgtgctgaacttaaacttaccagattacattataatgc

SEQ ID NO: 73644 - DNA, 40 bp, Homo sapiens
cattataatgtaatctggtaagtttaagttcagcacatta

SEQ ID NO: 73645 - DNA, 40 bp, Homo sapiens
taatgtgctgaacttaaacttaccagattacattataatg

SEQ ID NO: 73646 - DNA, 40 bp, Homo sapiens
attataatgtaatctggtaagtttaagttcagcacattaa

SEQ ID NO: 73647 - DNA, 40 bp, Homo sapiens
ttaatgtgctgaacttaaacttaccagattacattataat

SEQ ID NO: 73648 - DNA, 40 bp, Homo sapiens
ttataatgtaatctggtaagtttaagttcagcacattaat

SEQ ID NO: 73649 - DNA, 40 bp, Homo sapiens
attaatgtgctgaacttaaacttaccagattacattataa

SEQ ID NO: 73650 - DNA, 40 bp, Homo sapiens
tataatgtaatctggtaagtttaagttcagcacattaatt

SEQ ID NO: 73651 - DNA, 40 bp, Homo sapiens
aattaatgtgctgaacttaaacttaccagattacattata

SEQ ID NO: 73652 - DNA, 40 bp, Homo sapiens
ataatgtaatctggtaagtttaagttcagcacattaattt

SEQ ID NO: 73653 - DNA, 40 bp, Homo sapiens
aaattaatgtgctgaacttaaacttaccagattacattat

SEQ ID NO: 73654 - DNA, 40 bp, Homo sapiens
taatgtaatctggtaagtttaagttcagcacattaatttt

SEQ ID NO: 73655 - DNA, 40 bp, Homo sapiens
aaaattaatgtgctgaacttaaacttaccagattacatta

SEQ ID NO: 73656 - DNA, 40 bp, Homo sapiens
aatgtaatctggtaagtttaagttcagcacattaattttg

SEQ ID NO: 73657 - DNA, 40 bp, Homo sapiens
caaaattaatgtgctgaacttaaacttaccagattacatt

SEQ ID NO: 73658 - DNA, 40 bp, Homo sapiens
atgtaatctggtaagtttaagttcagcacattaattttgg

SEQ ID NO: 73659 - DNA, 40 bp, Homo sapiens
ccaaaattaatgtgctgaacttaaacttaccagattacat

SEQ ID NO: 73660 - DNA, 40 bp, Homo sapiens
tgtaatctggtaagtttaagttcagcacattaattttggc

SEQ ID NO: 73661 - DNA, 40 bp, Homo sapiens
gccaaaattaatgtgctgaacttaaacttaccagattaca

SEQ ID NO: 73662 - DNA, 40 bp, Homo sapiens
gtaatctggtaagtttaagttcagcacattaattttggca

SEQ ID NO: 73663 - DNA, 40 bp, Homo sapiens
tgccaaaattaatgtgctgaacttaaacttaccagattac

SEQ ID NO: 73664 - DNA, 40 bp, Homo sapiens
taatctggtaagtttaagttcagcacattaattttggcag

SEQ ID NO: 73665 - DNA, 40 bp, Homo sapiens
ctgccaaaattaatgtgctgaacttaaacttaccagatta

SEQ ID NO: 73666 - DNA, 40 bp, Homo sapiens
aatctggtaagtttaagttcagcacattaattttggcaga

SEQ ID NO: 73667 - DNA, 40 bp, Homo sapiens
tctgccaaaattaatgtgctgaacttaaacttaccagatt

SEQ ID NO: 73668 - DNA, 40 bp, Homo sapiens
atctggtaagtttaagttcagcacattaattttggcagaa

SEQ ID NO: 73669 - DNA, 40 bp, Homo sapiens
ttctgccaaaattaatgtgctgaacttaaacttaccagat

SEQ ID NO: 73670 - DNA, 40 bp, Homo sapiens
tctggtaagtttaagttcagcacattaattttggcagaaa

SEQ ID NO: 73671 - DNA, 40 bp, Homo sapiens
tttctgccaaaattaatgtgctgaacttaaacttaccaga

SEQ ID NO: 73672 - DNA, 40 bp, Homo sapiens
ctggtaagtttaagttcagcacattaattttggcagaaag

SEQ ID NO: 73673 - DNA, 40 bp, Homo sapiens
ctttctgccaaaattaatgtgctgaacttaaacttaccag

SEQ ID NO: 73674 - DNA, 40 bp, Homo sapiens
tggtaagtttaagttcagcacattaattttggcagaaagc

SEQ ID NO: 73675 - DNA, 40 bp, Homo sapiens
gctttctgccaaaattaatgtgctgaacttaaacttacca

SEQ ID NO: 73676 - DNA, 40 bp, Homo sapiens
ggtaagtttaagttcagcacattaattttggcagaaagca

SEQ ID NO: 73677 - DNA, 40 bp, Homo sapiens
tgctttctgccaaaattaatgtgctgaacttaaacttacc

SEQ ID NO: 73678 - DNA, 40 bp, Homo sapiens
gtaagtttaagttcagcacattaattttggcagaaagcag

SEQ ID NO: 73679 - DNA, 40 bp, Homo sapiens
ctgctttctgccaaaattaatgtgctgaacttaaacttac

SEQ ID NO: 73680 - DNA, 40 bp, Homo sapiens
taagtttaagttcagcacattaattttggcagaaagcaga

SEQ ID NO: 73681 - DNA, 40 bp, Homo sapiens
tctgctttctgccaaaattaatgtgctgaacttaaactta

SEQ ID NO: 73682 - DNA, 40 bp, Homo sapiens
aagtttaagttcagcacattaattttggcagaaagcagat

SEQ ID NO: 73683 - DNA, 40 bp, Homo sapiens
atctgctttctgccaaaattaatgtgctgaacttaaactt

SEQ ID NO: 73684 - DNA, 40 bp, Homo sapiens
agtttaagttcagcacattaattttggcagaaagcagatg

SEQ ID NO: 73685 - DNA, 40 bp, Homo sapiens
catctgctttctgccaaaattaatgtgctgaacttaaact

SEQ ID NO: 73686 - DNA, 40 bp, Homo sapiens
gtttaagttcagcacattaattttggcagaaagcagatgt

SEQ ID NO: 73687 - DNA, 40 bp, Homo sapiens
acatctgctttctgccaaaattaatgtgctgaacttaaac

SEQ ID NO: 73688 - DNA, 40 bp, Homo sapiens
tttaagttcagcacattaattttggcagaaagcagatgtc

SEQ ID NO: 73689 - DNA, 40 bp, Homo sapiens
gacatctgctttctgccaaaattaatgtgctgaacttaaa

SEQ ID NO: 73690 - DNA, 40 bp, Homo sapiens
ttaagttcagcacattaattttggcagaaagcagatgtct

SEQ ID NO: 73691 - DNA, 40 bp, Homo sapiens
agacatctgctttctgccaaaattaatgtgctgaacttaa

SEQ ID NO: 73692 - DNA, 40 bp, Homo sapiens
taagttcagcacattaattttggcagaaagcagatgtctt

SEQ ID NO: 73693 - DNA, 40 bp, Homo sapiens
aagacatctgctttctgccaaaattaatgtgctgaactta

SEQ ID NO: 73694 - DNA, 40 bp, Homo sapiens
aagttcagcacattaattttggcagaaagcagatgtcttt

SEQ ID NO: 73695 - DNA, 40 bp, Homo sapiens
aaagacatctgctttctgccaaaattaatgtgctgaactt

SEQ ID NO: 73696 - DNA, 40 bp, Homo sapiens
agttcagcacattaattttggcagaaagcagatgtctttt

SEQ ID NO: 73697 - DNA, 40 bp, Homo sapiens
aaaagacatctgctttctgccaaaattaatgtgctgaact

SEQ ID NO: 73698 - DNA, 40 bp, Homo sapiens
gttcagcacattaattttggcagaaagcagatgtctttta

SEQ ID NO: 73699 - DNA, 40 bp, Homo sapiens
taaaagacatctgctttctgccaaaattaatgtgctgaac

SEQ ID NO: 73700 - DNA, 40 bp, Homo sapiens
ttcagcacattaattttggcagaaagcagatgtcttttaa

SEQ ID NO: 73701 - DNA, 40 bp, Homo sapiens
ttaaaagacatctgctttctgccaaaattaatgtgctgaa

SEQ ID NO: 73702 - DNA, 40 bp, Homo sapiens
tcagcacattaattttggcagaaagcagatgtcttttaaa

SEQ ID NO: 73703 - DNA, 40 bp, Homo sapiens
tttaaaagacatctgctttctgccaaaattaatgtgctga

SEQ ID NO: 73704 - DNA, 40 bp, Homo sapiens
cagcacattaattttggcagaaagcagatgtcttttaaag

SEQ ID NO: 73705 - DNA, 40 bp, Homo sapiens
ctttaaaagacatctgctttctgccaaaattaatgtgctg

SEQ ID NO: 73706 - DNA, 40 bp, Homo sapiens
agcacattaattttggcagaaagcagatgtcttttaaagg

SEQ ID NO: 73707 - DNA, 40 bp, Homo sapiens
cctttaaaagacatctgctttctgccaaaattaatgtgct

SEQ ID NO: 73708 - DNA, 40 bp, Homo sapiens
gcacattaattttggcagaaagcagatgtcttttaaaggt

SEQ ID NO: 73709 - DNA, 40 bp, Homo sapiens
acctttaaaagacatctgctttctgccaaaattaatgtgc

SEQ ID NO: 73710 - DNA, 40 bp, Homo sapiens
cacattaattttggcagaaagcagatgtcttttaaaggta

SEQ ID NO: 73711 - DNA, 40 bp, Homo sapiens
tacctttaaaagacatctgctttctgccaaaattaatgtg

SEQ ID NO: 73712 - DNA, 40 bp, Homo sapiens
acattaattttggcagaaagcagatgtcttttaaaggtaa

SEQ ID NO: 73713 - DNA, 40 bp, Homo sapiens
ttacctttaaaagacatctgctttctgccaaaattaatgt

SEQ ID NO: 73714 - DNA, 40 bp, Homo sapiens
cattaattttggcagaaagcagatgtcttttaaaggtaac

SEQ ID NO: 73715 - DNA, 40 bp, Homo sapiens
gttacctttaaaagacatctgctttctgccaaaattaatg

SEQ ID NO: 73716 - DNA, 40 bp, Homo sapiens
attaattttggcagaaagcagatgtcttttaaaggtaaca

SEQ ID NO: 73717 - DNA, 40 bp, Homo sapiens
tgttacctttaaaagacatctgctttctgccaaaattaat

SEQ ID NO: 73718 - DNA, 40 bp, Homo sapiens
ttaattttggcagaaagcagatgtcttttaaaggtaacaa

SEQ ID NO: 73719 - DNA, 40 bp, Homo sapiens
ttgttacctttaaaagacatctgctttctgccaaaattaa

SEQ ID NO: 73720 - DNA, 40 bp, Homo sapiens
taattttggcagaaagcagatgtcttttaaaggtaacaag

SEQ ID NO: 73721 - DNA, 40 bp, Homo sapiens
cttgttacctttaaaagacatctgctttctgccaaaatta

SEQ ID NO: 73722 - DNA, 40 bp, Homo sapiens
aattttggcagaaagcagatgtcttttaaaggtaacaagg

SEQ ID NO: 73723 - DNA, 40 bp, Homo sapiens
ccttgttacctttaaaagacatctgctttctgccaaaatt

SEQ ID NO: 73724 - DNA, 40 bp, Homo sapiens
attttggcagaaagcagatgtcttttaaaggtaacaaggt

SEQ ID NO: 73725 - DNA, 40 bp, Homo sapiens
accttgttacctttaaaagacatctgctttctgccaaaat

SEQ ID NO: 73726 - DNA, 40 bp, Homo sapiens
ttttggcagaaagcagatgtcttttaaaggtaacaaggtg

SEQ ID NO: 73727 - DNA, 40 bp, Homo sapiens
caccttgttacctttaaaagacatctgctttctgccaaaa

SEQ ID NO: 73728 - DNA, 40 bp, Homo sapiens
tttggcagaaagcagatgtcttttaaaggtaacaaggtgg

SEQ ID NO: 73729 - DNA, 40 bp, Homo sapiens
ccaccttgttacctttaaaagacatctgctttctgccaaa

SEQ ID NO: 73730 - DNA, 40 bp, Homo sapiens
ttggcagaaagcagatgtcttttaaaggtaacaaggtggc

SEQ ID NO: 73731 - DNA, 40 bp, Homo sapiens
gccaccttgttacctttaaaagacatctgctttctgccaa

SEQ ID NO: 73732 - DNA, 40 bp, Homo sapiens
tggcagaaagcagatgtcttttaaaggtaacaaggtggca

SEQ ID NO: 73733 - DNA, 40 bp, Homo sapiens
tgccaccttgttacctttaaaagacatctgctttctgcca

SEQ ID NO: 73734 - DNA, 40 bp, Homo sapiens
ggcagaaagcagatgtcttttaaaggtaacaaggtggcaa

SEQ ID NO: 73735 - DNA, 40 bp, Homo sapiens
ttgccaccttgttacctttaaaagacatctgctttctgcc

SEQ ID NO: 73736 - DNA, 40 bp, Homo sapiens
gcagaaagcagatgtcttttaaaggtaacaaggtggcaac

SEQ ID NO: 73737 - DNA, 40 bp, Homo sapiens
gttgccaccttgttacctttaaaagacatctgctttctgc

SEQ ID NO: 73738 - DNA, 40 bp, Homo sapiens
cagaaagcagatgtcttttaaaggtaacaaggtggcaacc

SEQ ID NO: 73739 - DNA, 40 bp, Homo sapiens
ggttgccaccttgttacctttaaaagacatctgctttctg

SEQ ID NO: 73740 - DNA, 40 bp, Homo sapiens
agaaagcagatgtcttttaaaggtaacaaggtggcaacca

SEQ ID NO: 73741 - DNA, 40 bp, Homo sapiens
tggttgccaccttgttacctttaaaagacatctgctttct

SEQ ID NO: 73742 - DNA, 40 bp, Homo sapiens
gaaagcagatgtcttttaaaggtaacaaggtggcaaccac

SEQ ID NO: 73743 - DNA, 40 bp, Homo sapiens
gtggttgccaccttgttacctttaaaagacatctgctttc

SEQ ID NO: 73744 - DNA, 40 bp, Homo sapiens
aaagcagatgtcttttaaaggtaacaaggtggcaaccact

SEQ ID NO: 73745 - DNA, 40 bp, Homo sapiens
agtggttgccaccttgttacctttaaaagacatctgcttt

SEQ ID NO: 73746 - DNA, 40 bp, Homo sapiens
aagcagatgtcttttaaaggtaacaaggtggcaaccactt

SEQ ID NO: 73747 - DNA, 40 bp, Homo sapiens
aagtggttgccaccttgttacctttaaaagacatctgctt

SEQ ID NO: 73748 - DNA, 40 bp, Homo sapiens
agcagatgtcttttaaaggtaacaaggtggcaaccacttt

SEQ ID NO: 73749 - DNA, 40 bp, Homo sapiens
aaagtggttgccaccttgttacctttaaaagacatctgct

SEQ ID NO: 73750 - DNA, 40 bp, Homo sapiens
gcagatgtcttttaaaggtaacaaggtggcaaccacttta

SEQ ID NO: 73751 - DNA, 40 bp, Homo sapiens
taaagtggttgccaccttgttacctttaaaagacatctgc

SEQ ID NO: 73752 - DNA, 40 bp, Homo sapiens
cagatgtcttttaaaggtaacaaggtggcaaccactttag

SEQ ID NO: 73753 - DNA, 40 bp, Homo sapiens
ctaaagtggttgccaccttgttacctttaaaagacatctg

SEQ ID NO: 73754 - DNA, 40 bp, Homo sapiens
agatgtcttttaaaggtaacaaggtggcaaccactttaga

SEQ ID NO: 73755 - DNA, 40 bp, Homo sapiens
tctaaagtggttgccaccttgttacctttaaaagacatct

SEQ ID NO: 73756 - DNA, 40 bp, Homo sapiens
gatgtcttttaaaggtaacaaggtggcaaccactttagaa

SEQ ID NO: 73757 - DNA, 40 bp, Homo sapiens
ttctaaagtggttgccaccttgttacctttaaaagacatc

SEQ ID NO: 73758 - DNA, 40 bp, Homo sapiens
atgtcttttaaaggtaacaaggtggcaaccactttagaac

SEQ ID NO: 73759 - DNA, 40 bp, Homo sapiens
gttctaaagtggttgccaccttgttacctttaaaagacat

SEQ ID NO: 73760 - DNA, 40 bp, Homo sapiens
tgtcttttaaaggtaacaaggtggcaaccactttagaact

SEQ ID NO: 73761 - DNA, 40 bp, Homo sapiens
agttctaaagtggttgccaccttgttacctttaaaagaca

SEQ ID NO: 73762 - DNA, 40 bp, Homo sapiens
gtcttttaaaggtaacaaggtggcaaccactttagaacta

SEQ ID NO: 73763 - DNA, 40 bp, Homo sapiens
tagttctaaagtggttgccaccttgttacctttaaaagac

SEQ ID NO: 73764 - DNA, 40 bp, Homo sapiens
tcttttaaaggtaacaaggtggcaaccactttagaactac

SEQ ID NO: 73765 - DNA, 40 bp, Homo sapiens
gtagttctaaagtggttgccaccttgttacctttaaaaga

SEQ ID NO: 73766 - DNA, 40 bp, Homo sapiens
cttttaaaggtaacaaggtggcaaccactttagaactact

SEQ ID NO: 73767 - DNA, 40 bp, Homo sapiens
agtagttctaaagtggttgccaccttgttacctttaaaag

SEQ ID NO: 73768 - DNA, 40 bp, Homo sapiens
ttttaaaggtaacaaggtggcaaccactttagaactactt

SEQ ID NO: 73769 - DNA, 40 bp, Homo sapiens
aagtagttctaaagtggttgccaccttgttacctttaaaa

SEQ ID NO: 73770 - DNA, 40 bp, Homo sapiens
tttaaaggtaacaaggtggcaaccactttagaactactta

SEQ ID NO: 73771 - DNA, 40 bp, Homo sapiens
taagtagttctaaagtggttgccaccttgttacctttaaa

SEQ ID NO: 73772 - DNA, 40 bp, Homo sapiens
ttaaaggtaacaaggtggcaaccactttagaactacttag

SEQ ID NO: 73773 - DNA, 40 bp, Homo sapiens
ctaagtagttctaaagtggttgccaccttgttacctttaa

SEQ ID NO: 73774 - DNA, 40 bp, Homo sapiens
taaaggtaacaaggtggcaaccactttagaactacttagg

SEQ ID NO: 73775 - DNA, 40 bp, Homo sapiens
cctaagtagttctaaagtggttgccaccttgttaccttta

SEQ ID NO: 73776 - DNA, 40 bp, Homo sapiens
aaaggtaacaaggtggcaaccactttagaactacttaggt

SEQ ID NO: 73777 - DNA, 40 bp, Homo sapiens
acctaagtagttctaaagtggttgccaccttgttaccttt

SEQ ID NO: 73778 - DNA, 40 bp, Homo sapiens
aaggtaacaaggtggcaaccactttagaactacttaggtg

SEQ ID NO: 73779 - DNA, 40 bp, Homo sapiens
cacctaagtagttctaaagtggttgccaccttgttacctt

SEQ ID NO: 73780 - DNA, 40 bp, Homo sapiens
aggtaacaaggtggcaaccactttagaactacttaggtgt

SEQ ID NO: 73781 - DNA, 40 bp, Homo sapiens
acacctaagtagttctaaagtggttgccaccttgttacct

SEQ ID NO: 73782 - DNA, 40 bp, Homo sapiens
ggtaacaaggtggcaaccactttagaactacttaggtgta

SEQ ID NO: 73783 - DNA, 40 bp, Homo sapiens
tacacctaagtagttctaaagtggttgccaccttgttacc

SEQ ID NO: 73784 - DNA, 40 bp, Homo sapiens
gtaacaaggtggcaaccactttagaactacttaggtgtag

SEQ ID NO: 73785 - DNA, 40 bp, Homo sapiens
ctacacctaagtagttctaaagtggttgccaccttgttac

SEQ ID NO: 73786 - DNA, 40 bp, Homo sapiens
taacaaggtggcaaccactttagaactacttaggtgtagt

SEQ ID NO: 73787 - DNA, 40 bp, Homo sapiens
actacacctaagtagttctaaagtggttgccaccttgtta

SEQ ID NO: 73788 - DNA, 40 bp, Homo sapiens
aacaaggtggcaaccactttagaactacttaggtgtagta

SEQ ID NO: 73789 - DNA, 40 bp, Homo sapiens
tactacacctaagtagttctaaagtggttgccaccttgtt

SEQ ID NO: 73790 - DNA, 40 bp, Homo sapiens
acaaggtggcaaccactttagaactacttaggtgtagtat

SEQ ID NO: 73791 - DNA, 40 bp, Homo sapiens
atactacacctaagtagttctaaagtggttgccaccttgt

SEQ ID NO: 73792 - DNA, 40 bp, Homo sapiens
caaggtggcaaccactttagaactacttaggtgtagtatt

SEQ ID NO: 73793 - DNA, 40 bp, Homo sapiens
aatactacacctaagtagttctaaagtggttgccaccttg

SEQ ID NO: 73794 - DNA, 40 bp, Homo sapiens
aaggtggcaaccactttagaactacttaggtgtagtattc

SEQ ID NO: 73795 - DNA, 40 bp, Homo sapiens
gaatactacacctaagtagttctaaagtggttgccacctt

SEQ ID NO: 73796 - DNA, 40 bp, Homo sapiens
aggtggcaaccactttagaactacttaggtgtagtattct

SEQ ID NO: 73797 - DNA, 40 bp, Homo sapiens
agaatactacacctaagtagttctaaagtggttgccacct

SEQ ID NO: 73798 - DNA, 40 bp, Homo sapiens
ggtggcaaccactttagaactacttaggtgtagtattcta

SEQ ID NO: 73799 - DNA, 40 bp, Homo sapiens
tagaatactacacctaagtagttctaaagtggttgccacc

SEQ ID NO: 73800 - DNA, 40 bp, Homo sapiens
gtggcaaccactttagaactacttaggtgtagtattctaa

SEQ ID NO: 73801 - DNA, 40 bp, Homo sapiens
ttagaatactacacctaagtagttctaaagtggttgccac

SEQ ID NO: 73802 - DNA, 40 bp, Homo sapiens
tggcaaccactttagaactacttaggtgtagtattctaac

SEQ ID NO: 73803 - DNA, 40 bp, Homo sapiens
gttagaatactacacctaagtagttctaaagtggttgcca

SEQ ID NO: 73804 - DNA, 40 bp, Homo sapiens
ggcaaccactttagaactacttaggtgtagtattctaact

SEQ ID NO: 73805 - DNA, 40 bp, Homo sapiens
agttagaatactacacctaagtagttctaaagtggttgcc

SEQ ID NO: 73806 - DNA, 40 bp, Homo sapiens
gcaaccactttagaactacttaggtgtagtattctaactt

SEQ ID NO: 73807 - DNA, 40 bp, Homo sapiens
aagttagaatactacacctaagtagttctaaagtggttgc

SEQ ID NO: 73808 - DNA, 40 bp, Homo sapiens
caaccactttagaactacttaggtgtagtattctaacttg

SEQ ID NO: 73809 - DNA, 40 bp, Homo sapiens
caagttagaatactacacctaagtagttctaaagtggttg

SEQ ID NO: 73810 - DNA, 40 bp, Homo sapiens
aaccactttagaactacttaggtgtagtattctaacttga

SEQ ID NO: 73811 - DNA, 40 bp, Homo sapiens
tcaagttagaatactacacctaagtagttctaaagtggtt

SEQ ID NO: 73812 - DNA, 40 bp, Homo sapiens
accactttagaactacttaggtgtagtattctaacttgaa

SEQ ID NO: 73813 - DNA, 40 bp, Homo sapiens
ttcaagttagaatactacacctaagtagttctaaagtggt

SEQ ID NO: 73814 - DNA, 40 bp, Homo sapiens
ccactttagaactacttaggtgtagtattctaacttgaag

SEQ ID NO: 73815 - DNA, 40 bp, Homo sapiens
cttcaagttagaatactacacctaagtagttctaaagtgg

SEQ ID NO: 73816 - DNA, 40 bp, Homo sapiens
cactttagaactacttaggtgtagtattctaacttgaagt

SEQ ID NO: 73817 - DNA, 40 bp, Homo sapiens
acttcaagttagaatactacacctaagtagttctaaagtg

SEQ ID NO: 73818 - DNA, 40 bp, Homo sapiens
actttagaactacttaggtgtagtattctaacttgaagta

SEQ ID NO: 73819 - DNA, 40 bp, Homo sapiens
tacttcaagttagaatactacacctaagtagttctaaagt

SEQ ID NO: 73820 - DNA, 40 bp, Homo sapiens
ctttagaactacttaggtgtagtattctaacttgaagtat

SEQ ID NO: 73821 - DNA, 40 bp, Homo sapiens
atacttcaagttagaatactacacctaagtagttctaaag

SEQ ID NO: 73822 - DNA, 40 bp, Homo sapiens
tttagaactacttaggtgtagtattctaacttgaagtatt

SEQ ID NO: 73823 - DNA, 40 bp, Homo sapiens
aatacttcaagttagaatactacacctaagtagttctaaa

SEQ ID NO: 73824 - DNA, 40 bp, Homo sapiens
ttagaactacttaggtgtagtattctaacttgaagtatta

SEQ ID NO: 73825 - DNA, 40 bp, Homo sapiens
taatacttcaagttagaatactacacctaagtagttctaa

SEQ ID NO: 73826 - DNA, 40 bp, Homo sapiens
tagaactacttaggtgtagtattctaacttgaagtattaa

SEQ ID NO: 73827 - DNA, 40 bp, Homo sapiens
ttaatacttcaagttagaatactacacctaagtagttcta

SEQ ID NO: 73828 - DNA, 40 bp, Homo sapiens
agaactacttaggtgtagtattctaacttgaagtattaaa

SEQ ID NO: 73829 - DNA, 40 bp, Homo sapiens
tttaatacttcaagttagaatactacacctaagtagttct

SEQ ID NO: 73830 - DNA, 40 bp, Homo sapiens
gaactacttaggtgtagtattctaacttgaagtattaaaa

SEQ ID NO: 73831 - DNA, 40 bp, Homo sapiens
ttttaatacttcaagttagaatactacacctaagtagttc

SEQ ID NO: 73832 - DNA, 40 bp, Homo sapiens
aactacttaggtgtagtattctaacttgaagtattaaaag

SEQ ID NO: 73833 - DNA, 40 bp, Homo sapiens
cttttaatacttcaagttagaatactacacctaagtagtt

SEQ ID NO: 73834 - DNA, 40 bp, Homo sapiens
actacttaggtgtagtattctaacttgaagtattaaaaga

SEQ ID NO: 73835 - DNA, 40 bp, Homo sapiens
tcttttaatacttcaagttagaatactacacctaagtagt

SEQ ID NO: 73836 - DNA, 40 bp, Homo sapiens
ctacttaggtgtagtattctaacttgaagtattaaaagat

SEQ ID NO: 73837 - DNA, 40 bp, Homo sapiens
atcttttaatacttcaagttagaatactacacctaagtag

SEQ ID NO: 73838 - DNA, 40 bp, Homo sapiens
tacttaggtgtagtattctaacttgaagtattaaaagata

SEQ ID NO: 73839 - DNA, 40 bp, Homo sapiens
tatcttttaatacttcaagttagaatactacacctaagta

SEQ ID NO: 73840 - DNA, 40 bp, Homo sapiens
acttaggtgtagtattctaacttgaagtattaaaagataa

SEQ ID NO: 73841 - DNA, 40 bp, Homo sapiens
ttatcttttaatacttcaagttagaatactacacctaagt

SEQ ID NO: 73842 - DNA, 40 bp, Homo sapiens
cttaggtgtagtattctaacttgaagtattaaaagataag

SEQ ID NO: 73843 - DNA, 40 bp, Homo sapiens
cttatcttttaatacttcaagttagaatactacacctaag

SEQ ID NO: 73844 - DNA, 40 bp, Homo sapiens
ttaggtgtagtattctaacttgaagtattaaaagataaga

SEQ ID NO: 73845 - DNA, 40 bp, Homo sapiens
tcttatcttttaatacttcaagttagaatactacacctaa

SEQ ID NO: 73846 - DNA, 40 bp, Homo sapiens
taggtgtagtattctaacttgaagtattaaaagataagaa

SEQ ID NO: 73847 - DNA, 40 bp, Homo sapiens
ttcttatcttttaatacttcaagttagaatactacaccta

SEQ ID NO: 73848 - DNA, 40 bp, Homo sapiens
aggtgtagtattctaacttgaagtattaaaagataagaaa

SEQ ID NO: 73849 - DNA, 40 bp, Homo sapiens
tttcttatcttttaatacttcaagttagaatactacacct

SEQ ID NO: 73850 - DNA, 40 bp, Homo sapiens
ggtgtagtattctaacttgaagtattaaaagataagaaac

SEQ ID NO: 73851 - DNA, 40 bp, Homo sapiens
gtttcttatcttttaatacttcaagttagaatactacacc

SEQ ID NO: 73852 - DNA, 40 bp, Homo sapiens
gtgtagtattctaacttgaagtattaaaagataagaaact

SEQ ID NO: 73853 - DNA, 40 bp, Homo sapiens
agtttcttatcttttaatacttcaagttagaatactacac

SEQ ID NO: 73854 - DNA, 40 bp, Homo sapiens
tgtagtattctaacttgaagtattaaaagataagaaactt

SEQ ID NO: 73855 - DNA, 40 bp, Homo sapiens
aagtttcttatcttttaatacttcaagttagaatactaca

SEQ ID NO: 73856 - DNA, 40 bp, Homo sapiens
gtagtattctaacttgaagtattaaaagataagaaacttg

SEQ ID NO: 73857 - DNA, 40 bp, Homo sapiens
caagtttcttatcttttaatacttcaagttagaatactac

SEQ ID NO: 73858 - DNA, 40 bp, Homo sapiens
tagtattctaacttgaagtattaaaagataagaaacttgt

SEQ ID NO: 73859 - DNA, 40 bp, Homo sapiens
acaagtttcttatcttttaatacttcaagttagaatacta

SEQ ID NO: 73860 - DNA, 40 bp, Homo sapiens
agtattctaacttgaagtattaaaagataagaaacttgtt

SEQ ID NO: 73861 - DNA, 40 bp, Homo sapiens
aacaagtttcttatcttttaatacttcaagttagaatact

SEQ ID NO: 73862 - DNA, 40 bp, Homo sapiens
gtattctaacttgaagtattaaaagataagaaacttgttt

SEQ ID NO: 73863 - DNA, 40 bp, Homo sapiens
aaacaagtttcttatcttttaatacttcaagttagaatac

SEQ ID NO: 73864 - DNA, 40 bp, Homo sapiens
tattctaacttgaagtattaaaagataagaaacttgtttc

SEQ ID NO: 73865 - DNA, 40 bp, Homo sapiens
gaaacaagtttcttatcttttaatacttcaagttagaata

SEQ ID NO: 73866 - DNA, 40 bp, Homo sapiens
attctaacttgaagtattaaaagataagaaacttgtttcc

SEQ ID NO: 73867 - DNA, 40 bp, Homo sapiens
ggaaacaagtttcttatcttttaatacttcaagttagaat

SEQ ID NO: 73868 - DNA, 40 bp, Homo sapiens
ttctaacttgaagtattaaaagataagaaacttgtttcca

SEQ ID NO: 73869 - DNA, 40 bp, Homo sapiens
tggaaacaagtttcttatcttttaatacttcaagttagaa

SEQ ID NO: 73870 - DNA, 40 bp, Homo sapiens
tctaacttgaagtattaaaagataagaaacttgtttccat

SEQ ID NO: 73871 - DNA, 40 bp, Homo sapiens
atggaaacaagtttcttatcttttaatacttcaagttaga

SEQ ID NO: 73872 - DNA, 40 bp, Homo sapiens
ctaacttgaagtattaaaagataagaaacttgtttccata

SEQ ID NO: 73873 - DNA, 40 bp, Homo sapiens
tatggaaacaagtttcttatcttttaatacttcaagttag

SEQ ID NO: 73874 - DNA, 40 bp, Homo sapiens
taacttgaagtattaaaagataagaaacttgtttccataa

SEQ ID NO: 73875 - DNA, 40 bp, Homo sapiens
ttatggaaacaagtttcttatcttttaatacttcaagtta

SEQ ID NO: 73876 - DNA, 40 bp, Homo sapiens
aacttgaagtattaaaagataagaaacttgtttccataat

SEQ ID NO: 73877 - DNA, 40 bp, Homo sapiens
attatggaaacaagtttcttatcttttaatacttcaagtt

SEQ ID NO: 73878 - DNA, 40 bp, Homo sapiens
acttgaagtattaaaagataagaaacttgtttccataatt

SEQ ID NO: 73879 - DNA, 40 bp, Homo sapiens
aattatggaaacaagtttcttatcttttaatacttcaagt

SEQ ID NO: 73880 - DNA, 40 bp, Homo sapiens
cttgaagtattaaaagataagaaacttgtttccataatta

SEQ ID NO: 73881 - DNA, 40 bp, Homo sapiens
taattatggaaacaagtttcttatcttttaatacttcaag

SEQ ID NO: 73882 - DNA, 40 bp, Homo sapiens
ttgaagtattaaaagataagaaacttgtttccataattag

SEQ ID NO: 73883 - DNA, 40 bp, Homo sapiens
ctaattatggaaacaagtttcttatcttttaatacttcaa

SEQ ID NO: 73884 - DNA, 40 bp, Homo sapiens
tgaagtattaaaagataagaaacttgtttccataattagt

SEQ ID NO: 73885 - DNA, 40 bp, Homo sapiens
actaattatggaaacaagtttcttatcttttaatacttca

SEQ ID NO: 73886 - DNA, 40 bp, Homo sapiens
gaagtattaaaagataagaaacttgtttccataattagta

SEQ ID NO: 73887 - DNA, 40 bp, Homo sapiens
tactaattatggaaacaagtttcttatcttttaatacttc

SEQ ID NO: 73888 - DNA, 40 bp, Homo sapiens
aagtattaaaagataagaaacttgtttccataattagtac

SEQ ID NO: 73889 - DNA, 40 bp, Homo sapiens
gtactaattatggaaacaagtttcttatcttttaatactt

SEQ ID NO: 73890 - DNA, 40 bp, Homo sapiens
agtattaaaagataagaaacttgtttccataattagtaca

SEQ ID NO: 73891 - DNA, 40 bp, Homo sapiens
tgtactaattatggaaacaagtttcttatcttttaatact

SEQ ID NO: 73892 - DNA, 40 bp, Homo sapiens
gtattaaaagataagaaacttgtttccataattagtacat

SEQ ID NO: 73893 - DNA, 40 bp, Homo sapiens
atgtactaattatggaaacaagtttcttatcttttaatac

SEQ ID NO: 73894 - DNA, 40 bp, Homo sapiens
tattaaaagataagaaacttgtttccataattagtacatt

SEQ ID NO: 73895 - DNA, 40 bp, Homo sapiens
aatgtactaattatggaaacaagtttcttatcttttaata

SEQ ID NO: 73896 - DNA, 40 bp, Homo sapiens
attaaaagataagaaacttgtttccataattagtacattt

SEQ ID NO: 73897 - DNA, 40 bp, Homo sapiens
aaatgtactaattatggaaacaagtttcttatcttttaat

SEQ ID NO: 73898 - DNA, 40 bp, Homo sapiens
ttaaaagataagaaacttgtttccataattagtacattta

SEQ ID NO: 73899 - DNA, 40 bp, Homo sapiens
taaatgtactaattatggaaacaagtttcttatcttttaa

SEQ ID NO: 73900 - DNA, 40 bp, Homo sapiens
taaaagataagaaacttgtttccataattagtacatttat

SEQ ID NO: 73901 - DNA, 40 bp, Homo sapiens
ataaatgtactaattatggaaacaagtttcttatctttta

SEQ ID NO: 73902 - DNA, 40 bp, Homo sapiens
aaaagataagaaacttgtttccataattagtacatttatt

SEQ ID NO: 73903 - DNA, 40 bp, Homo sapiens
aataaatgtactaattatggaaacaagtttcttatctttt

SEQ ID NO: 73904 - DNA, 40 bp, Homo sapiens
aaagataagaaacttgtttccataattagtacatttattt

SEQ ID NO: 73905 - DNA, 40 bp, Homo sapiens
aaataaatgtactaattatggaaacaagtttcttatcttt

SEQ ID NO: 73906 - DNA, 40 bp, Homo sapiens
aagataagaaacttgtttccataattagtacatttatttt

SEQ ID NO: 73907 - DNA, 40 bp, Homo sapiens
aaaataaatgtactaattatggaaacaagtttcttatctt

SEQ ID NO: 73908 - DNA, 40 bp, Homo sapiens
agataagaaacttgtttccataattagtacatttattttt

SEQ ID NO: 73909 - DNA, 40 bp, Homo sapiens
aaaaataaatgtactaattatggaaacaagtttcttatct

SEQ ID NO: 73910 - DNA, 40 bp, Homo sapiens
gataagaaacttgtttccataattagtacatttattttta

SEQ ID NO: 73911 - DNA, 40 bp, Homo sapiens
taaaaataaatgtactaattatggaaacaagtttcttatc

SEQ ID NO: 73912 - DNA, 40 bp, Homo sapiens
ataagaaacttgtttccataattagtacatttatttttaa

SEQ ID NO: 73913 - DNA, 40 bp, Homo sapiens
ttaaaaataaatgtactaattatggaaacaagtttcttat

SEQ ID NO: 73914 - DNA, 40 bp, Homo sapiens
taagaaacttgtttccataattagtacatttatttttaat

SEQ ID NO: 73915 - DNA, 40 bp, Homo sapiens
attaaaaataaatgtactaattatggaaacaagtttctta

SEQ ID NO: 73916 - DNA, 40 bp, Homo sapiens
aagaaacttgtttccataattagtacatttatttttaatc

SEQ ID NO: 73917 - DNA, 40 bp, Homo sapiens
gattaaaaataaatgtactaattatggaaacaagtttctt

SEQ ID NO: 73918 - DNA, 40 bp, Homo sapiens
agaaacttgtttccataattagtacatttatttttaatct

SEQ ID NO: 73919 - DNA, 40 bp, Homo sapiens
agattaaaaataaatgtactaattatggaaacaagtttct

SEQ ID NO: 73920 - DNA, 40 bp, Homo sapiens
gaaacttgtttccataattagtacatttatttttaatcta

SEQ ID NO: 73921 - DNA, 40 bp, Homo sapiens
tagattaaaaataaatgtactaattatggaaacaagtttc

SEQ ID NO: 73922 - DNA, 40 bp, Homo sapiens
aaacttgtttccataattagtacatttatttttaatctag

SEQ ID NO: 73923 - DNA, 40 bp, Homo sapiens
ctagattaaaaataaatgtactaattatggaaacaagttt

SEQ ID NO: 73924 - DNA, 40 bp, Homo sapiens
aacttgtttccataattagtacatttatttttaatctagt

SEQ ID NO: 73925 - DNA, 40 bp, Homo sapiens
actagattaaaaataaatgtactaattatggaaacaagtt

SEQ ID NO: 73926 - DNA, 40 bp, Homo sapiens
acttgtttccataattagtacatttatttttaatctagtg

SEQ ID NO: 73927 - DNA, 40 bp, Homo sapiens
cactagattaaaaataaatgtactaattatggaaacaagt

SEQ ID NO: 73928 - DNA, 40 bp, Homo sapiens
cttgtttccataattagtacatttatttttaatctagtgg

SEQ ID NO: 73929 - DNA, 40 bp, Homo sapiens
ccactagattaaaaataaatgtactaattatggaaacaag

SEQ ID NO: 73930 - DNA, 40 bp, Homo sapiens
ttgtttccataattagtacatttatttttaatctagtggg

SEQ ID NO: 73931 - DNA, 40 bp, Homo sapiens
cccactagattaaaaataaatgtactaattatggaaacaa

SEQ ID NO: 73932 - DNA, 40 bp, Homo sapiens
tgtttccataattagtacatttatttttaatctagtggga

SEQ ID NO: 73933 - DNA, 40 bp, Homo sapiens
tcccactagattaaaaataaatgtactaattatggaaaca

SEQ ID NO: 73934 - DNA, 40 bp, Homo sapiens
gtttccataattagtacatttatttttaatctagtgggaa

SEQ ID NO: 73935 - DNA, 40 bp, Homo sapiens
ttcccactagattaaaaataaatgtactaattatggaaac

SEQ ID NO: 73936 - DNA, 40 bp, Homo sapiens
tttccataattagtacatttatttttaatctagtgggaat

SEQ ID NO: 73937 - DNA, 40 bp, Homo sapiens
attcccactagattaaaaataaatgtactaattatggaaa

SEQ ID NO: 73938 - DNA, 40 bp, Homo sapiens
ttccataattagtacatttatttttaatctagtgggaatt

SEQ ID NO: 73939 - DNA, 40 bp, Homo sapiens
aattcccactagattaaaaataaatgtactaattatggaa

SEQ ID NO: 73940 - DNA, 40 bp, Homo sapiens
tccataattagtacatttatttttaatctagtgggaatta

SEQ ID NO: 73941 - DNA, 40 bp, Homo sapiens
taattcccactagattaaaaataaatgtactaattatgga

SEQ ID NO: 73942 - DNA, 40 bp, Homo sapiens
ccataattagtacatttatttttaatctagtgggaattaa

SEQ ID NO: 73943 - DNA, 40 bp, Homo sapiens
ttaattcccactagattaaaaataaatgtactaattatgg

SEQ ID NO: 73944 - DNA, 40 bp, Homo sapiens
cataattagtacatttatttttaatctagtgggaattaat

SEQ ID NO: 73945 - DNA, 40 bp, Homo sapiens
attaattcccactagattaaaaataaatgtactaattatg

SEQ ID NO: 73946 - DNA, 40 bp, Homo sapiens
ataattagtacatttatttttaatctagtgggaattaatt

SEQ ID NO: 73947 - DNA, 40 bp, Homo sapiens
aattaattcccactagattaaaaataaatgtactaattat

SEQ ID NO: 73948 - DNA, 40 bp, Homo sapiens
taattagtacatttatttttaatctagtgggaattaatta

SEQ ID NO: 73949 - DNA, 40 bp, Homo sapiens
taattaattcccactagattaaaaataaatgtactaatta

SEQ ID NO: 73950 - DNA, 40 bp, Homo sapiens
aattagtacatttatttttaatctagtgggaattaattat

SEQ ID NO: 73951 - DNA, 40 bp, Homo sapiens
ataattaattcccactagattaaaaataaatgtactaatt

SEQ ID NO: 73952 - DNA, 40 bp, Homo sapiens
attagtacatttatttttaatctagtgggaattaattata

SEQ ID NO: 73953 - DNA, 40 bp, Homo sapiens
tataattaattcccactagattaaaaataaatgtactaat

SEQ ID NO: 73954 - DNA, 40 bp, Homo sapiens
ttagtacatttatttttaatctagtgggaattaattataa

SEQ ID NO: 73955 - DNA, 40 bp, Homo sapiens
ttataattaattcccactagattaaaaataaatgtactaa

SEQ ID NO: 73956 - DNA, 40 bp, Homo sapiens
tagtacatttatttttaatctagtgggaattaattataat

SEQ ID NO: 73957 - DNA, 40 bp, Homo sapiens
attataattaattcccactagattaaaaataaatgtacta

SEQ ID NO: 73958 - DNA, 40 bp, Homo sapiens
agtacatttatttttaatctagtgggaattaattataatt

SEQ ID NO: 73959 - DNA, 40 bp, Homo sapiens
aattataattaattcccactagattaaaaataaatgtact

SEQ ID NO: 73960 - DNA, 40 bp, Homo sapiens
gtacatttatttttaatctagtgggaattaattataattg

SEQ ID NO: 73961 - DNA, 40 bp, Homo sapiens
caattataattaattcccactagattaaaaataaatgtac

SEQ ID NO: 73962 - DNA, 40 bp, Homo sapiens
tacatttatttttaatctagtgggaattaattataattga

SEQ ID NO: 73963 - DNA, 40 bp, Homo sapiens
tcaattataattaattcccactagattaaaaataaatgta

SEQ ID NO: 73964 - DNA, 40 bp, Homo sapiens
acatttatttttaatctagtgggaattaattataattgag

SEQ ID NO: 73965 - DNA, 40 bp, Homo sapiens
ctcaattataattaattcccactagattaaaaataaatgt

SEQ ID NO: 73966 - DNA, 40 bp, Homo sapiens
catttatttttaatctagtgggaattaattataattgaga

SEQ ID NO: 73967 - DNA, 40 bp, Homo sapiens
tctcaattataattaattcccactagattaaaaataaatg

SEQ ID NO: 73968 - DNA, 40 bp, Homo sapiens
atttatttttaatctagtgggaattaattataattgagac

SEQ ID NO: 73969 - DNA, 40 bp, Homo sapiens
gtctcaattataattaattcccactagattaaaaataaat

SEQ ID NO: 73970 - DNA, 40 bp, Homo sapiens
tttatttttaatctagtgggaattaattataattgagaca

SEQ ID NO: 73971 - DNA, 40 bp, Homo sapiens
tgtctcaattataattaattcccactagattaaaaataaa

SEQ ID NO: 73972 - DNA, 40 bp, Homo sapiens
ttatttttaatctagtgggaattaattataattgagacaa

SEQ ID NO: 73973 - DNA, 40 bp, Homo sapiens
ttgtctcaattataattaattcccactagattaaaaataa

SEQ ID NO: 73974 - DNA, 40 bp, Homo sapiens
tatttttaatctagtgggaattaattataattgagacaat

SEQ ID NO: 73975 - DNA, 40 bp, Homo sapiens
attgtctcaattataattaattcccactagattaaaaata

SEQ ID NO: 73976 - DNA, 40 bp, Homo sapiens
atttttaatctagtgggaattaattataattgagacaatt

SEQ ID NO: 73977 - DNA, 40 bp, Homo sapiens
aattgtctcaattataattaattcccactagattaaaaat

SEQ ID NO: 73978 - DNA, 40 bp, Homo sapiens
tttttaatctagtgggaattaattataattgagacaattt

SEQ ID NO: 73979 - DNA, 40 bp, Homo sapiens
aaattgtctcaattataattaattcccactagattaaaaa

SEQ ID NO: 73980 - DNA, 40 bp, Homo sapiens
ttttaatctagtgggaattaattataattgagacaatttt

SEQ ID NO: 73981 - DNA, 40 bp, Homo sapiens
aaaattgtctcaattataattaattcccactagattaaaa

SEQ ID NO: 73982 - DNA, 40 bp, Homo sapiens
tttaatctagtgggaattaattataattgagacaattttg

SEQ ID NO: 73983 - DNA, 40 bp, Homo sapiens
caaaattgtctcaattataattaattcccactagattaaa

SEQ ID NO: 73984 - DNA, 40 bp, Homo sapiens
ttaatctagtgggaattaattataattgagacaattttga

SEQ ID NO: 73985 - DNA, 40 bp, Homo sapiens
tcaaaattgtctcaattataattaattcccactagattaa

SEQ ID NO: 73986 - DNA, 40 bp, Homo sapiens
taatctagtgggaattaattataattgagacaattttgat

SEQ ID NO: 73987 - DNA, 40 bp, Homo sapiens
atcaaaattgtctcaattataattaattcccactagatta

SEQ ID NO: 73988 - DNA, 40 bp, Homo sapiens
aatctagtgggaattaattataattgagacaattttgatg

SEQ ID NO: 73989 - DNA, 40 bp, Homo sapiens
catcaaaattgtctcaattataattaattcccactagatt

SEQ ID NO: 73990 - DNA, 40 bp, Homo sapiens
atctagtgggaattaattataattgagacaattttgatgg

SEQ ID NO: 73991 - DNA, 40 bp, Homo sapiens
ccatcaaaattgtctcaattataattaattcccactagat

SEQ ID NO: 73992 - DNA, 40 bp, Homo sapiens
tctagtgggaattaattataattgagacaattttgatggc

SEQ ID NO: 73993 - DNA, 40 bp, Homo sapiens
gccatcaaaattgtctcaattataattaattcccactaga

SEQ ID NO: 73994 - DNA, 40 bp, Homo sapiens
ctagtgggaattaattataattgagacaattttgatggct

SEQ ID NO: 73995 - DNA, 40 bp, Homo sapiens
agccatcaaaattgtctcaattataattaattcccactag

SEQ ID NO: 73996 - DNA, 40 bp, Homo sapiens
tagtgggaattaattataattgagacaattttgatggctg

SEQ ID NO: 73997 - DNA, 40 bp, Homo sapiens
cagccatcaaaattgtctcaattataattaattcccacta

SEQ ID NO: 73998 - DNA, 40 bp, Homo sapiens
agtgggaattaattataattgagacaattttgatggctgt

SEQ ID NO: 73999 - DNA, 40 bp, Homo sapiens
acagccatcaaaattgtctcaattataattaattcccact

SEQ ID NO: 74000 - DNA, 40 bp, Homo sapiens
gtgggaattaattataattgagacaattttgatggctgta

SEQ ID NO: 74001 - DNA, 40 bp, Homo sapiens
tacagccatcaaaattgtctcaattataattaattcccac

SEQ ID NO: 74002 - DNA, 40 bp, Homo sapiens
tgggaattaattataattgagacaattttgatggctgtag

SEQ ID NO: 74003 - DNA, 40 bp, Homo sapiens
ctacagccatcaaaattgtctcaattataattaattccca

SEQ ID NO: 74004 - DNA, 40 bp, Homo sapiens
gggaattaattataattgagacaattttgatggctgtagt

SEQ ID NO: 74005 - DNA, 40 bp, Homo sapiens
actacagccatcaaaattgtctcaattataattaattccc

SEQ ID NO: 74006 - DNA, 40 bp, Homo sapiens
ggaattaattataattgagacaattttgatggctgtagta

SEQ ID NO: 74007 - DNA, 40 bp, Homo sapiens
tactacagccatcaaaattgtctcaattataattaattcc

SEQ ID NO: 74008 - DNA, 40 bp, Homo sapiens
gaattaattataattgagacaattttgatggctgtagtag

SEQ ID NO: 74009 - DNA, 40 bp, Homo sapiens
ctactacagccatcaaaattgtctcaattataattaattc

SEQ ID NO: 74010 - DNA, 40 bp, Homo sapiens
aattaattataattgagacaattttgatggctgtagtaga

SEQ ID NO: 74011 - DNA, 40 bp, Homo sapiens
tctactacagccatcaaaattgtctcaattataattaatt

SEQ ID NO: 74012 - DNA, 40 bp, Homo sapiens
attaattataattgagacaattttgatggctgtagtagac

SEQ ID NO: 74013 - DNA, 40 bp, Homo sapiens
gtctactacagccatcaaaattgtctcaattataattaat

SEQ ID NO: 74014 - DNA, 40 bp, Homo sapiens
ttaattataattgagacaattttgatggctgtagtagact

SEQ ID NO: 74015 - DNA, 40 bp, Homo sapiens
agtctactacagccatcaaaattgtctcaattataattaa

SEQ ID NO: 74016 - DNA, 40 bp, Homo sapiens
taattataattgagacaattttgatggctgtagtagacta

SEQ ID NO: 74017 - DNA, 40 bp, Homo sapiens
tagtctactacagccatcaaaattgtctcaattataatta

SEQ ID NO: 74018 - DNA, 40 bp, Homo sapiens
aattataattgagacaattttgatggctgtagtagactaa

SEQ ID NO: 74019 - DNA, 40 bp, Homo sapiens
ttagtctactacagccatcaaaattgtctcaattataatt

SEQ ID NO: 74020 - DNA, 40 bp, Homo sapiens
attataattgagacaattttgatggctgtagtagactaat

SEQ ID NO: 74021 - DNA, 40 bp, Homo sapiens
attagtctactacagccatcaaaattgtctcaattataat

SEQ ID NO: 74022 - DNA, 40 bp, Homo sapiens
ttataattgagacaattttgatggctgtagtagactaatc

SEQ ID NO: 74023 - DNA, 40 bp, Homo sapiens
gattagtctactacagccatcaaaattgtctcaattataa

SEQ ID NO: 74024 - DNA, 40 bp, Homo sapiens
tataattgagacaattttgatggctgtagtagactaatct

SEQ ID NO: 74025 - DNA, 40 bp, Homo sapiens
agattagtctactacagccatcaaaattgtctcaattata

SEQ ID NO: 74026 - DNA, 40 bp, Homo sapiens
ataattgagacaattttgatggctgtagtagactaatcta

SEQ ID NO: 74027 - DNA, 40 bp, Homo sapiens
tagattagtctactacagccatcaaaattgtctcaattat

SEQ ID NO: 74028 - DNA, 40 bp, Homo sapiens
taattgagacaattttgatggctgtagtagactaatctat

SEQ ID NO: 74029 - DNA, 40 bp, Homo sapiens
atagattagtctactacagccatcaaaattgtctcaatta

SEQ ID NO: 74030 - DNA, 40 bp, Homo sapiens
aattgagacaattttgatggctgtagtagactaatctata

SEQ ID NO: 74031 - DNA, 40 bp, Homo sapiens
tatagattagtctactacagccatcaaaattgtctcaatt

SEQ ID NO: 74032 - DNA, 40 bp, Homo sapiens
attgagacaattttgatggctgtagtagactaatctatat

SEQ ID NO: 74033 - DNA, 40 bp, Homo sapiens
atatagattagtctactacagccatcaaaattgtctcaat

SEQ ID NO: 74034 - DNA, 40 bp, Homo sapiens
ttgagacaattttgatggctgtagtagactaatctatatt

SEQ ID NO: 74035 - DNA, 40 bp, Homo sapiens
aatatagattagtctactacagccatcaaaattgtctcaa

SEQ ID NO: 74036 - DNA, 40 bp, Homo sapiens
tgagacaattttgatggctgtagtagactaatctatattt

SEQ ID NO: 74037 - DNA, 40 bp, Homo sapiens
aaatatagattagtctactacagccatcaaaattgtctca

SEQ ID NO: 74038 - DNA, 40 bp, Homo sapiens
gagacaattttgatggctgtagtagactaatctatatttg

SEQ ID NO: 74039 - DNA, 40 bp, Homo sapiens
caaatatagattagtctactacagccatcaaaattgtctc

SEQ ID NO: 74040 - DNA, 40 bp, Homo sapiens
agacaattttgatggctgtagtagactaatctatatttgg

SEQ ID NO: 74041 - DNA, 40 bp, Homo sapiens
ccaaatatagattagtctactacagccatcaaaattgtct

SEQ ID NO: 74042 - DNA, 40 bp, Homo sapiens
gacaattttgatggctgtagtagactaatctatatttggc

SEQ ID NO: 74043 - DNA, 40 bp, Homo sapiens
gccaaatatagattagtctactacagccatcaaaattgtc

SEQ ID NO: 74044 - DNA, 40 bp, Homo sapiens
acaattttgatggctgtagtagactaatctatatttggca

SEQ ID NO: 74045 - DNA, 40 bp, Homo sapiens
tgccaaatatagattagtctactacagccatcaaaattgt

SEQ ID NO: 74046 - DNA, 40 bp, Homo sapiens
caattttgatggctgtagtagactaatctatatttggcat

SEQ ID NO: 74047 - DNA, 40 bp, Homo sapiens
atgccaaatatagattagtctactacagccatcaaaattg

SEQ ID NO: 74048 - DNA, 40 bp, Homo sapiens
aattttgatggctgtagtagactaatctatatttggcata

SEQ ID NO: 74049 - DNA, 40 bp, Homo sapiens
tatgccaaatatagattagtctactacagccatcaaaatt

SEQ ID NO: 74050 - DNA, 40 bp, Homo sapiens
attttgatggctgtagtagactaatctatatttggcataa

SEQ ID NO: 74051 - DNA, 40 bp, Homo sapiens
ttatgccaaatatagattagtctactacagccatcaaaat

SEQ ID NO: 74052 - DNA, 40 bp, Homo sapiens
ttttgatggctgtagtagactaatctatatttggcataaa

SEQ ID NO: 74053 - DNA, 40 bp, Homo sapiens
tttatgccaaatatagattagtctactacagccatcaaaa

SEQ ID NO: 74054 - DNA, 40 bp, Homo sapiens
tttgatggctgtagtagactaatctatatttggcataaag

SEQ ID NO: 74055 - DNA, 40 bp, Homo sapiens
ctttatgccaaatatagattagtctactacagccatcaaa

SEQ ID NO: 74056 - DNA, 40 bp, Homo sapiens
ttgatggctgtagtagactaatctatatttggcataaagt

SEQ ID NO: 74057 - DNA, 40 bp, Homo sapiens
actttatgccaaatatagattagtctactacagccatcaa

SEQ ID NO: 74058 - DNA, 40 bp, Homo sapiens
tgatggctgtagtagactaatctatatttggcataaagtc

SEQ ID NO: 74059 - DNA, 40 bp, Homo sapiens
gactttatgccaaatatagattagtctactacagccatca

SEQ ID NO: 74060 - DNA, 40 bp, Homo sapiens
gatggctgtagtagactaatctatatttggcataaagtct

SEQ ID NO: 74061 - DNA, 40 bp, Homo sapiens
agactttatgccaaatatagattagtctactacagccatc

SEQ ID NO: 74062 - DNA, 40 bp, Homo sapiens
atggctgtagtagactaatctatatttggcataaagtcta

SEQ ID NO: 74063 - DNA, 40 bp, Homo sapiens
tagactttatgccaaatatagattagtctactacagccat

SEQ ID NO: 74064 - DNA, 40 bp, Homo sapiens
tggctgtagtagactaatctatatttggcataaagtctaa

SEQ ID NO: 74065 - DNA, 40 bp, Homo sapiens
ttagactttatgccaaatatagattagtctactacagcca

SEQ ID NO: 74066 - DNA, 40 bp, Homo sapiens
ggctgtagtagactaatctatatttggcataaagtctaat

SEQ ID NO: 74067 - DNA, 40 bp, Homo sapiens
attagactttatgccaaatatagattagtctactacagcc

SEQ ID NO: 74068 - DNA, 40 bp, Homo sapiens
gctgtagtagactaatctatatttggcataaagtctaatg

SEQ ID NO: 74069 - DNA, 40 bp, Homo sapiens
cattagactttatgccaaatatagattagtctactacagc

SEQ ID NO: 74070 - DNA, 40 bp, Homo sapiens
ctgtagtagactaatctatatttggcataaagtctaatga

SEQ ID NO: 74071 - DNA, 40 bp, Homo sapiens
tcattagactttatgccaaatatagattagtctactacag

SEQ ID NO: 74072 - DNA, 40 bp, Homo sapiens
tgtagtagactaatctatatttggcataaagtctaatgat

SEQ ID NO: 74073 - DNA, 40 bp, Homo sapiens
atcattagactttatgccaaatatagattagtctactaca

SEQ ID NO: 74074 - DNA, 40 bp, Homo sapiens
gtagtagactaatctatatttggcataaagtctaatgatt

SEQ ID NO: 74075 - DNA, 40 bp, Homo sapiens
aatcattagactttatgccaaatatagattagtctactac

SEQ ID NO: 74076 - DNA, 40 bp, Homo sapiens
tagtagactaatctatatttggcataaagtctaatgattt

SEQ ID NO: 74077 - DNA, 40 bp, Homo sapiens
aaatcattagactttatgccaaatatagattagtctacta

SEQ ID NO: 74078 - DNA, 40 bp, Homo sapiens
agtagactaatctatatttggcataaagtctaatgattta

SEQ ID NO: 74079 - DNA, 40 bp, Homo sapiens
taaatcattagactttatgccaaatatagattagtctact

SEQ ID NO: 74080 - DNA, 40 bp, Homo sapiens
gtagactaatctatatttggcataaagtctaatgatttaa

SEQ ID NO: 74081 - DNA, 40 bp, Homo sapiens
ttaaatcattagactttatgccaaatatagattagtctac

SEQ ID NO: 74082 - DNA, 40 bp, Homo sapiens
tagactaatctatatttggcataaagtctaatgatttaat

SEQ ID NO: 74083 - DNA, 40 bp, Homo sapiens
attaaatcattagactttatgccaaatatagattagtcta

SEQ ID NO: 74084 - DNA, 40 bp, Homo sapiens
agactaatctatatttggcataaagtctaatgatttaatg

SEQ ID NO: 74085 - DNA, 40 bp, Homo sapiens
cattaaatcattagactttatgccaaatatagattagtct

SEQ ID NO: 74086 - DNA, 40 bp, Homo sapiens
gactaatctatatttggcataaagtctaatgatttaatga

SEQ ID NO: 74087 - DNA, 40 bp, Homo sapiens
tcattaaatcattagactttatgccaaatatagattagtc

SEQ ID NO: 74088 - DNA, 40 bp, Homo sapiens
actaatctatatttggcataaagtctaatgatttaatgag

SEQ ID NO: 74089 - DNA, 40 bp, Homo sapiens
ctcattaaatcattagactttatgccaaatatagattagt

SEQ ID NO: 74090 - DNA, 40 bp, Homo sapiens
ctaatctatatttggcataaagtctaatgatttaatgagt

SEQ ID NO: 74091 - DNA, 40 bp, Homo sapiens
actcattaaatcattagactttatgccaaatatagattag

SEQ ID NO: 74092 - DNA, 40 bp, Homo sapiens
taatctatatttggcataaagtctaatgatttaatgagtc

SEQ ID NO: 74093 - DNA, 40 bp, Homo sapiens
gactcattaaatcattagactttatgccaaatatagatta

SEQ ID NO: 74094 - DNA, 40 bp, Homo sapiens
aatctatatttggcataaagtctaatgatttaatgagtct

SEQ ID NO: 74095 - DNA, 40 bp, Homo sapiens
agactcattaaatcattagactttatgccaaatatagatt

SEQ ID NO: 74096 - DNA, 40 bp, Homo sapiens
atctatatttggcataaagtctaatgatttaatgagtctt

SEQ ID NO: 74097 - DNA, 40 bp, Homo sapiens
aagactcattaaatcattagactttatgccaaatatagat

SEQ ID NO: 74098 - DNA, 40 bp, Homo sapiens
tctatatttggcataaagtctaatgatttaatgagtctta

SEQ ID NO: 74099 - DNA, 40 bp, Homo sapiens
taagactcattaaatcattagactttatgccaaatataga

SEQ ID NO: 74100 - DNA, 40 bp, Homo sapiens
ctatatttggcataaagtctaatgatttaatgagtcttaa

SEQ ID NO: 74101 - DNA, 40 bp, Homo sapiens
ttaagactcattaaatcattagactttatgccaaatatag

SEQ ID NO: 74102 - DNA, 40 bp, Homo sapiens
tatatttggcataaagtctaatgatttaatgagtcttaag

SEQ ID NO: 74103 - DNA, 40 bp, Homo sapiens
cttaagactcattaaatcattagactttatgccaaatata

SEQ ID NO: 74104 - DNA, 40 bp, Homo sapiens
atatttggcataaagtctaatgatttaatgagtcttaagt

SEQ ID NO: 74105 - DNA, 40 bp, Homo sapiens
acttaagactcattaaatcattagactttatgccaaatat

SEQ ID NO: 74106 - DNA, 40 bp, Homo sapiens
tatttggcataaagtctaatgatttaatgagtcttaagta

SEQ ID NO: 74107 - DNA, 40 bp, Homo sapiens
tacttaagactcattaaatcattagactttatgccaaata

SEQ ID NO: 74108 - DNA, 40 bp, Homo sapiens
atttggcataaagtctaatgatttaatgagtcttaagtaa

SEQ ID NO: 74109 - DNA, 40 bp, Homo sapiens
ttacttaagactcattaaatcattagactttatgccaaat

SEQ ID NO: 74110 - DNA, 40 bp, Homo sapiens
tttggcataaagtctaatgatttaatgagtcttaagtaaa

SEQ ID NO: 74111 - DNA, 40 bp, Homo sapiens
tttacttaagactcattaaatcattagactttatgccaaa

SEQ ID NO: 74112 - DNA, 40 bp, Homo sapiens
ttggcataaagtctaatgatttaatgagtcttaagtaaac

SEQ ID NO: 74113 - DNA, 40 bp, Homo sapiens
gtttacttaagactcattaaatcattagactttatgccaa

SEQ ID NO: 74114 - DNA, 40 bp, Homo sapiens
tggcataaagtctaatgatttaatgagtcttaagtaaact

SEQ ID NO: 74115 - DNA, 40 bp, Homo sapiens
agtttacttaagactcattaaatcattagactttatgcca

SEQ ID NO: 74116 - DNA, 40 bp, Homo sapiens
ggcataaagtctaatgatttaatgagtcttaagtaaacta

SEQ ID NO: 74117 - DNA, 40 bp, Homo sapiens
tagtttacttaagactcattaaatcattagactttatgcc

SEQ ID NO: 74118 - DNA, 40 bp, Homo sapiens
gcataaagtctaatgatttaatgagtcttaagtaaactaa

SEQ ID NO: 74119 - DNA, 40 bp, Homo sapiens
ttagtttacttaagactcattaaatcattagactttatgc

SEQ ID NO: 74120 - DNA, 40 bp, Homo sapiens
cataaagtctaatgatttaatgagtcttaagtaaactaaa

SEQ ID NO: 74121 - DNA, 40 bp, Homo sapiens
tttagtttacttaagactcattaaatcattagactttatg

SEQ ID NO: 74122 - DNA, 40 bp, Homo sapiens
ataaagtctaatgatttaatgagtcttaagtaaactaaat

SEQ ID NO: 74123 - DNA, 40 bp, Homo sapiens
atttagtttacttaagactcattaaatcattagactttat

SEQ ID NO: 74124 - DNA, 40 bp, Homo sapiens
taaagtctaatgatttaatgagtcttaagtaaactaaata

SEQ ID NO: 74125 - DNA, 40 bp, Homo sapiens
tatttagtttacttaagactcattaaatcattagacttta

SEQ ID NO: 74126 - DNA, 40 bp, Homo sapiens
aaagtctaatgatttaatgagtcttaagtaaactaaatat

SEQ ID NO: 74127 - DNA, 40 bp, Homo sapiens
atatttagtttacttaagactcattaaatcattagacttt

SEQ ID NO: 74128 - DNA, 40 bp, Homo sapiens
aagtctaatgatttaatgagtcttaagtaaactaaatatt

SEQ ID NO: 74129 - DNA, 40 bp, Homo sapiens
aatatttagtttacttaagactcattaaatcattagactt

SEQ ID NO: 74130 - DNA, 40 bp, Homo sapiens
agtctaatgatttaatgagtcttaagtaaactaaatattt

SEQ ID NO: 74131 - DNA, 40 bp, Homo sapiens
aaatatttagtttacttaagactcattaaatcattagact

SEQ ID NO: 74132 - DNA, 40 bp, Homo sapiens
gtctaatgatttaatgagtcttaagtaaactaaatatttg

SEQ ID NO: 74133 - DNA, 40 bp, Homo sapiens
caaatatttagtttacttaagactcattaaatcattagac

SEQ ID NO: 74134 - DNA, 40 bp, Homo sapiens
tctaatgatttaatgagtcttaagtaaactaaatatttgg

SEQ ID NO: 74135 - DNA, 40 bp, Homo sapiens
ccaaatatttagtttacttaagactcattaaatcattaga

SEQ ID NO: 74136 - DNA, 40 bp, Homo sapiens
ctaatgatttaatgagtcttaagtaaactaaatatttgga

SEQ ID NO: 74137 - DNA, 40 bp, Homo sapiens
tccaaatatttagtttacttaagactcattaaatcattag

SEQ ID NO: 74138 - DNA, 40 bp, Homo sapiens
taatgatttaatgagtcttaagtaaactaaatatttggaa

SEQ ID NO: 74139 - DNA, 40 bp, Homo sapiens
ttccaaatatttagtttacttaagactcattaaatcatta

SEQ ID NO: 74140 - DNA, 40 bp, Homo sapiens
aatgatttaatgagtcttaagtaaactaaatatttggaaa

SEQ ID NO: 74141 - DNA, 40 bp, Homo sapiens
tttccaaatatttagtttacttaagactcattaaatcatt

SEQ ID NO: 74142 - DNA, 40 bp, Homo sapiens
atgatttaatgagtcttaagtaaactaaatatttggaaac

SEQ ID NO: 74143 - DNA, 40 bp, Homo sapiens
gtttccaaatatttagtttacttaagactcattaaatcat

SEQ ID NO: 74144 - DNA, 40 bp, Homo sapiens
tgatttaatgagtcttaagtaaactaaatatttggaaact

SEQ ID NO: 74145 - DNA, 40 bp, Homo sapiens
agtttccaaatatttagtttacttaagactcattaaatca

SEQ ID NO: 74146 - DNA, 40 bp, Homo sapiens
gatttaatgagtcttaagtaaactaaatatttggaaactg

SEQ ID NO: 74147 - DNA, 40 bp, Homo sapiens
cagtttccaaatatttagtttacttaagactcattaaatc

SEQ ID NO: 74148 - DNA, 40 bp, Homo sapiens
atttaatgagtcttaagtaaactaaatatttggaaactga

SEQ ID NO: 74149 - DNA, 40 bp, Homo sapiens
tcagtttccaaatatttagtttacttaagactcattaaat

SEQ ID NO: 74150 - DNA, 40 bp, Homo sapiens
tttaatgagtcttaagtaaactaaatatttggaaactgat

SEQ ID NO: 74151 - DNA, 40 bp, Homo sapiens
atcagtttccaaatatttagtttacttaagactcattaaa

SEQ ID NO: 74152 - DNA, 40 bp, Homo sapiens
ttaatgagtcttaagtaaactaaatatttggaaactgata

SEQ ID NO: 74153 - DNA, 40 bp, Homo sapiens
tatcagtttccaaatatttagtttacttaagactcattaa

SEQ ID NO: 74154 - DNA, 40 bp, Homo sapiens
taatgagtcttaagtaaactaaatatttggaaactgatat

SEQ ID NO: 74155 - DNA, 40 bp, Homo sapiens
atatcagtttccaaatatttagtttacttaagactcatta

SEQ ID NO: 74156 - DNA, 40 bp, Homo sapiens
aatgagtcttaagtaaactaaatatttggaaactgatatt

SEQ ID NO: 74157 - DNA, 40 bp, Homo sapiens
aatatcagtttccaaatatttagtttacttaagactcatt

SEQ ID NO: 74158 - DNA, 40 bp, Homo sapiens
atgagtcttaagtaaactaaatatttggaaactgatattt

SEQ ID NO: 74159 - DNA, 40 bp, Homo sapiens
aaatatcagtttccaaatatttagtttacttaagactcat

SEQ ID NO: 74160 - DNA, 40 bp, Homo sapiens
tgagtcttaagtaaactaaatatttggaaactgatattta

SEQ ID NO: 74161 - DNA, 40 bp, Homo sapiens
taaatatcagtttccaaatatttagtttacttaagactca

SEQ ID NO: 74162 - DNA, 40 bp, Homo sapiens
gagtcttaagtaaactaaatatttggaaactgatatttac

SEQ ID NO: 74163 - DNA, 40 bp, Homo sapiens
gtaaatatcagtttccaaatatttagtttacttaagactc

SEQ ID NO: 74164 - DNA, 40 bp, Homo sapiens
agtcttaagtaaactaaatatttggaaactgatatttacc

SEQ ID NO: 74165 - DNA, 40 bp, Homo sapiens
ggtaaatatcagtttccaaatatttagtttacttaagact

SEQ ID NO: 74166 - DNA, 40 bp, Homo sapiens
gtcttaagtaaactaaatatttggaaactgatatttacct

SEQ ID NO: 74167 - DNA, 40 bp, Homo sapiens
aggtaaatatcagtttccaaatatttagtttacttaagac

SEQ ID NO: 74168 - DNA, 40 bp, Homo sapiens
tcttaagtaaactaaatatttggaaactgatatttacctt

SEQ ID NO: 74169 - DNA, 40 bp, Homo sapiens
aaggtaaatatcagtttccaaatatttagtttacttaaga

SEQ ID NO: 74170 - DNA, 40 bp, Homo sapiens
cttaagtaaactaaatatttggaaactgatatttaccttt

SEQ ID NO: 74171 - DNA, 40 bp, Homo sapiens
aaaggtaaatatcagtttccaaatatttagtttacttaag

SEQ ID NO: 74172 - DNA, 40 bp, Homo sapiens
ttaagtaaactaaatatttggaaactgatatttaccttta

SEQ ID NO: 74173 - DNA, 40 bp, Homo sapiens
taaaggtaaatatcagtttccaaatatttagtttacttaa

SEQ ID NO: 74174 - DNA, 40 bp, Homo sapiens
taagtaaactaaatatttggaaactgatatttacctttat

SEQ ID NO: 74175 - DNA, 40 bp, Homo sapiens
ataaaggtaaatatcagtttccaaatatttagtttactta

SEQ ID NO: 74176 - DNA, 40 bp, Homo sapiens
aagtaaactaaatatttggaaactgatatttacctttatt

SEQ ID NO: 74177 - DNA, 40 bp, Homo sapiens
aataaaggtaaatatcagtttccaaatatttagtttactt

SEQ ID NO: 74178 - DNA, 40 bp, Homo sapiens
agtaaactaaatatttggaaactgatatttacctttattt

SEQ ID NO: 74179 - DNA, 40 bp, Homo sapiens
aaataaaggtaaatatcagtttccaaatatttagtttact

SEQ ID NO: 74180 - DNA, 40 bp, Homo sapiens
gtaaactaaatatttggaaactgatatttacctttatttt

SEQ ID NO: 74181 - DNA, 40 bp, Homo sapiens
aaaataaaggtaaatatcagtttccaaatatttagtttac

SEQ ID NO: 74182 - DNA, 40 bp, Homo sapiens
taaactaaatatttggaaactgatatttacctttattttt

SEQ ID NO: 74183 - DNA, 40 bp, Homo sapiens
aaaaataaaggtaaatatcagtttccaaatatttagttta

SEQ ID NO: 74184 - DNA, 40 bp, Homo sapiens
aaactaaatatttggaaactgatatttacctttattttta

SEQ ID NO: 74185 - DNA, 40 bp, Homo sapiens
taaaaataaaggtaaatatcagtttccaaatatttagttt

SEQ ID NO: 74186 - DNA, 40 bp, Homo sapiens
aactaaatatttggaaactgatatttacctttatttttaa

SEQ ID NO: 74187 - DNA, 40 bp, Homo sapiens
ttaaaaataaaggtaaatatcagtttccaaatatttagtt

SEQ ID NO: 74188 - DNA, 40 bp, Homo sapiens
actaaatatttggaaactgatatttacctttatttttaag

SEQ ID NO: 74189 - DNA, 40 bp, Homo sapiens
cttaaaaataaaggtaaatatcagtttccaaatatttagt

SEQ ID NO: 74190 - DNA, 40 bp, Homo sapiens
ctaaatatttggaaactgatatttacctttatttttaagg

SEQ ID NO: 74191 - DNA, 40 bp, Homo sapiens
ccttaaaaataaaggtaaatatcagtttccaaatatttag

SEQ ID NO: 74192 - DNA, 40 bp, Homo sapiens
taaatatttggaaactgatatttacctttatttttaaggg

SEQ ID NO: 74193 - DNA, 40 bp, Homo sapiens
cccttaaaaataaaggtaaatatcagtttccaaatattta

SEQ ID NO: 74194 - DNA, 40 bp, Homo sapiens
aaatatttggaaactgatatttacctttatttttaaggga

SEQ ID NO: 74195 - DNA, 40 bp, Homo sapiens
tcccttaaaaataaaggtaaatatcagtttccaaatattt

SEQ ID NO: 74196 - DNA, 40 bp, Homo sapiens
aatatttggaaactgatatttacctttatttttaagggaa

SEQ ID NO: 74197 - DNA, 40 bp, Homo sapiens
ttcccttaaaaataaaggtaaatatcagtttccaaatatt

SEQ ID NO: 74198 - DNA, 40 bp, Homo sapiens
atatttggaaactgatatttacctttatttttaagggaaa

SEQ ID NO: 74199 - DNA, 40 bp, Homo sapiens
tttcccttaaaaataaaggtaaatatcagtttccaaatat

SEQ ID NO: 74200 - DNA, 40 bp, Homo sapiens
tatttggaaactgatatttacctttatttttaagggaaaa

SEQ ID NO: 74201 - DNA, 40 bp, Homo sapiens
ttttcccttaaaaataaaggtaaatatcagtttccaaata

SEQ ID NO: 74202 - DNA, 40 bp, Homo sapiens
atttggaaactgatatttacctttatttttaagggaaaag

SEQ ID NO: 74203 - DNA, 40 bp, Homo sapiens
cttttcccttaaaaataaaggtaaatatcagtttccaaat

SEQ ID NO: 74204 - DNA, 40 bp, Homo sapiens
tttggaaactgatatttacctttatttttaagggaaaagt

SEQ ID NO: 74205 - DNA, 40 bp, Homo sapiens
acttttcccttaaaaataaaggtaaatatcagtttccaaa

SEQ ID NO: 74206 - DNA, 40 bp, Homo sapiens
ttggaaactgatatttacctttatttttaagggaaaagtt

SEQ ID NO: 74207 - DNA, 40 bp, Homo sapiens
aacttttcccttaaaaataaaggtaaatatcagtttccaa

SEQ ID NO: 74208 - DNA, 40 bp, Homo sapiens
tggaaactgatatttacctttatttttaagggaaaagttt

SEQ ID NO: 74209 - DNA, 40 bp, Homo sapiens
aaacttttcccttaaaaataaaggtaaatatcagtttcca

SEQ ID NO: 74210 - DNA, 40 bp, Homo sapiens
ggaaactgatatttacctttatttttaagggaaaagtttt

SEQ ID NO: 74211 - DNA, 40 bp, Homo sapiens
aaaacttttcccttaaaaataaaggtaaatatcagtttcc

SEQ ID NO: 74212 - DNA, 40 bp, Homo sapiens
gaaactgatatttacctttatttttaagggaaaagttttg

SEQ ID NO: 74213 - DNA, 40 bp, Homo sapiens
caaaacttttcccttaaaaataaaggtaaatatcagtttc

SEQ ID NO: 74214 - DNA, 40 bp, Homo sapiens
aaactgatatttacctttatttttaagggaaaagttttga

SEQ ID NO: 74215 - DNA, 40 bp, Homo sapiens
tcaaaacttttcccttaaaaataaaggtaaatatcagttt

SEQ ID NO: 74216 - DNA, 40 bp, Homo sapiens
aactgatatttacctttatttttaagggaaaagttttgag

SEQ ID NO: 74217 - DNA, 40 bp, Homo sapiens
ctcaaaacttttcccttaaaaataaaggtaaatatcagtt

SEQ ID NO: 74218 - DNA, 40 bp, Homo sapiens
actgatatttacctttatttttaagggaaaagttttgaga

SEQ ID NO: 74219 - DNA, 40 bp, Homo sapiens
tctcaaaacttttcccttaaaaataaaggtaaatatcagt

SEQ ID NO: 74220 - DNA, 40 bp, Homo sapiens
ctgatatttacctttatttttaagggaaaagttttgagat

SEQ ID NO: 74221 - DNA, 40 bp, Homo sapiens
atctcaaaacttttcccttaaaaataaaggtaaatatcag

SEQ ID NO: 74222 - DNA, 40 bp, Homo sapiens
tgatatttacctttatttttaagggaaaagttttgagata

SEQ ID NO: 74223 - DNA, 40 bp, Homo sapiens
tatctcaaaacttttcccttaaaaataaaggtaaatatca

SEQ ID NO: 74224 - DNA, 40 bp, Homo sapiens
gatatttacctttatttttaagggaaaagttttgagataa

SEQ ID NO: 74225 - DNA, 40 bp, Homo sapiens
ttatctcaaaacttttcccttaaaaataaaggtaaatatc

SEQ ID NO: 74226 - DNA, 40 bp, Homo sapiens
atatttacctttatttttaagggaaaagttttgagataat

SEQ ID NO: 74227 - DNA, 40 bp, Homo sapiens
attatctcaaaacttttcccttaaaaataaaggtaaatat

SEQ ID NO: 74228 - DNA, 40 bp, Homo sapiens
tatttacctttatttttaagggaaaagttttgagataatc

SEQ ID NO: 74229 - DNA, 40 bp, Homo sapiens
gattatctcaaaacttttcccttaaaaataaaggtaaata

SEQ ID NO: 74230 - DNA, 40 bp, Homo sapiens
atttacctttatttttaagggaaaagttttgagataatca

SEQ ID NO: 74231 - DNA, 40 bp, Homo sapiens
tgattatctcaaaacttttcccttaaaaataaaggtaaat

SEQ ID NO: 74232 - DNA, 40 bp, Homo sapiens
tttacctttatttttaagggaaaagttttgagataatcag

SEQ ID NO: 74233 - DNA, 40 bp, Homo sapiens
ctgattatctcaaaacttttcccttaaaaataaaggtaaa

SEQ ID NO: 74234 - DNA, 40 bp, Homo sapiens
ttacctttatttttaagggaaaagttttgagataatcagc

SEQ ID NO: 74235 - DNA, 40 bp, Homo sapiens
gctgattatctcaaaacttttcccttaaaaataaaggtaa

SEQ ID NO: 74236 - DNA, 40 bp, Homo sapiens
tacctttatttttaagggaaaagttttgagataatcagca

SEQ ID NO: 74237 - DNA, 40 bp, Homo sapiens
tgctgattatctcaaaacttttcccttaaaaataaaggta

SEQ ID NO: 74238 - DNA, 40 bp, Homo sapiens
acctttatttttaagggaaaagttttgagataatcagcag

SEQ ID NO: 74239 - DNA, 40 bp, Homo sapiens
ctgctgattatctcaaaacttttcccttaaaaataaaggt

SEQ ID NO: 74240 - DNA, 40 bp, Homo sapiens
cctttatttttaagggaaaagttttgagataatcagcagc

SEQ ID NO: 74241 - DNA, 40 bp, Homo sapiens
gctgctgattatctcaaaacttttcccttaaaaataaagg

SEQ ID NO: 74242 - DNA, 40 bp, Homo sapiens
ctttatttttaagggaaaagttttgagataatcagcagct

SEQ ID NO: 74243 - DNA, 40 bp, Homo sapiens
agctgctgattatctcaaaacttttcccttaaaaataaag

SEQ ID NO: 74244 - DNA, 40 bp, Homo sapiens
tttatttttaagggaaaagttttgagataatcagcagctt

SEQ ID NO: 74245 - DNA, 40 bp, Homo sapiens
aagctgctgattatctcaaaacttttcccttaaaaataaa

SEQ ID NO: 74246 - DNA, 40 bp, Homo sapiens
ttatttttaagggaaaagttttgagataatcagcagcttt

SEQ ID NO: 74247 - DNA, 40 bp, Homo sapiens
aaagctgctgattatctcaaaacttttcccttaaaaataa

SEQ ID NO: 74248 - DNA, 40 bp, Homo sapiens
tatttttaagggaaaagttttgagataatcagcagctttt

SEQ ID NO: 74249 - DNA, 40 bp, Homo sapiens
aaaagctgctgattatctcaaaacttttcccttaaaaata

SEQ ID NO: 74250 - DNA, 40 bp, Homo sapiens
atttttaagggaaaagttttgagataatcagcagcttttt

SEQ ID NO: 74251 - DNA, 40 bp, Homo sapiens
aaaaagctgctgattatctcaaaacttttcccttaaaaat

SEQ ID NO: 74252 - DNA, 40 bp, Homo sapiens
tttttaagggaaaagttttgagataatcagcagctttttt

SEQ ID NO: 74253 - DNA, 40 bp, Homo sapiens
aaaaaagctgctgattatctcaaaacttttcccttaaaaa

SEQ ID NO: 74254 - DNA, 40 bp, Homo sapiens
ttttaagggaaaagttttgagataatcagcagcttttttt

SEQ ID NO: 74255 - DNA, 40 bp, Homo sapiens
aaaaaaagctgctgattatctcaaaacttttcccttaaaa

SEQ ID NO: 74256 - DNA, 40 bp, Homo sapiens
tttaagggaaaagttttgagataatcagcagctttttttt

SEQ ID NO: 74257 - DNA, 40 bp, Homo sapiens
aaaaaaaagctgctgattatctcaaaacttttcccttaaa

SEQ ID NO: 74258 - DNA, 40 bp, Homo sapiens
ttaagggaaaagttttgagataatcagcagcttttttttt

SEQ ID NO: 74259 - DNA, 40 bp, Homo sapiens
aaaaaaaaagctgctgattatctcaaaacttttcccttaa

SEQ ID NO: 74260 - DNA, 40 bp, Homo sapiens
taagggaaaagttttgagataatcagcagctttttttttt

SEQ ID NO: 74261 - DNA, 40 bp, Homo sapiens
aaaaaaaaaagctgctgattatctcaaaacttttccctta

SEQ ID NO: 74262 - DNA, 40 bp, Homo sapiens
aagggaaaagttttgagataatcagcagcttttttttttt

SEQ ID NO: 74263 - DNA, 40 bp, Homo sapiens
aaaaaaaaaaagctgctgattatctcaaaacttttccctt

SEQ ID NO: 74264 - DNA, 40 bp, Homo sapiens
agggaaaagttttgagataatcagcagctttttttttttt

SEQ ID NO: 74265 - DNA, 40 bp, Homo sapiens
aaaaaaaaaaaagctgctgattatctcaaaacttttccct

SEQ ID NO: 74266 - DNA, 40 bp, Homo sapiens
gggaaaagttttgagataatcagcagcttttttttttttt

SEQ ID NO: 74267 - DNA, 40 bp, Homo sapiens
aaaaaaaaaaaaagctgctgattatctcaaaacttttccc

SEQ ID NO: 74268 - DNA, 40 bp, Homo sapiens
ggaaaagttttgagataatcagcagctttttttttttttt

SEQ ID NO: 74269 - DNA, 40 bp, Homo sapiens
aaaaaaaaaaaaaagctgctgattatctcaaaacttttcc

SEQ ID NO: 74270 - DNA, 40 bp, Homo sapiens
gaaaagttttgagataatcagcagcttttttttttttttt

SEQ ID NO: 74271 - DNA, 40 bp, Homo sapiens
aaaaaaaaaaaaaaagctgctgattatctcaaaacttttc

SEQ ID NO: 74272 - DNA, 40 bp, Homo sapiens
aaaagttttgagataatcagcagctttttttttttttttt

SEQ ID NO: 74273 - DNA, 40 bp, Homo sapiens
aaaaaaaaaaaaaaaagctgctgattatctcaaaactttt

SEQ ID NO: 74274 - DNA, 40 bp, Homo sapiens
aaagttttgagataatcagcagcttttttttttttttttt

SEQ ID NO: 74275 - DNA, 40 bp, Homo sapiens
aaaaaaaaaaaaaaaaagctgctgattatctcaaaacttt

SEQ ID NO: 74276 - DNA, 40 bp, Homo sapiens
aagttttgagataatcagcagctttttttttttttttttt

SEQ ID NO: 74277 - DNA, 40 bp, Homo sapiens
aaaaaaaaaaaaaaaaaagctgctgattatctcaaaactt

SEQ ID NO: 74278 - DNA, 40 bp, Homo sapiens
agttttgagataatcagcagcttttttttttttttttttt

SEQ ID NO: 74279 - DNA, 40 bp, Homo sapiens
aaaaaaaaaaaaaaaaaaagctgctgattatctcaaaact

SEQ ID NO: 74280 - DNA, 40 bp, Homo sapiens
gttttgagataatcagcagctttttttttttttttttttt

SEQ ID NO: 74281 - DNA, 40 bp, Homo sapiens
aaaaaaaaaaaaaaaaaaaagctgctgattatctcaaaac

SEQ ID NO: 74282 - DNA, 40 bp, Homo sapiens
ttttgagataatcagcagcttttttttttttttttttttt

SEQ ID NO: 74283 - DNA, 40 bp, Homo sapiens
aaaaaaaaaaaaaaaaaaaaagctgctgattatctcaaaa

SEQ ID NO: 74284 - DNA, 40 bp, Homo sapiens
tttgagataatcagcagctttttttttttttttttttttt

SEQ ID NO: 74285 - DNA, 40 bp, Homo sapiens
aaaaaaaaaaaaaaaaaaaaaagctgctgattatctcaaa

SEQ ID NO: 74286 - DNA, 40 bp, Homo sapiens
ttgagataatcagcagcttttttttttttttttttttttt

SEQ ID NO: 74287 - DNA, 40 bp, Homo sapiens
aaaaaaaaaaaaaaaaaaaaaaagctgctgattatctcaa

SEQ ID NO: 74288 - DNA, 40 bp, Homo sapiens
tgagataatcagcagctttttttttttttttttttttttt

SEQ ID NO: 74289 - DNA, 40 bp, Homo sapiens
aaaaaaaaaaaaaaaaaaaaaaaagctgctgattatctca

SEQ ID NO: 74290 - DNA, 40 bp, Homo sapiens
gagataatcagcagctttttttttttttttttttttttta

SEQ ID NO: 74291 - DNA, 40 bp, Homo sapiens
taaaaaaaaaaaaaaaaaaaaaaaagctgctgattatctc

SEQ ID NO: 74292 - DNA, 40 bp, Homo sapiens
agataatcagcagcttttttttttttttttttttttttag

SEQ ID NO: 74293 - DNA, 40 bp, Homo sapiens
ctaaaaaaaaaaaaaaaaaaaaaaaagctgctgattatct

SEQ ID NO: 74294 - DNA, 40 bp, Homo sapiens
gataatcagcagcttttttttttttttttttttttttagt

SEQ ID NO: 74295 - DNA, 40 bp, Homo sapiens
actaaaaaaaaaaaaaaaaaaaaaaaagctgctgattatc

SEQ ID NO: 74296 - DNA, 40 bp, Homo sapiens
ataatcagcagcttttttttttttttttttttttttagta

SEQ ID NO: 74297 - DNA, 40 bp, Homo sapiens
tactaaaaaaaaaaaaaaaaaaaaaaaagctgctgattat

SEQ ID NO: 74298 - DNA, 40 bp, Homo sapiens
taatcagcagcttttttttttttttttttttttttagtag

SEQ ID NO: 74299 - DNA, 40 bp, Homo sapiens
ctactaaaaaaaaaaaaaaaaaaaaaaaagctgctgatta

SEQ ID NO: 74300 - DNA, 40 bp, Homo sapiens
aatcagcagcttttttttttttttttttttttttagtagg

SEQ ID NO: 74301 - DNA, 40 bp, Homo sapiens
cctactaaaaaaaaaaaaaaaaaaaaaaaagctgctgatt

SEQ ID NO: 74302 - DNA, 40 bp, Homo sapiens
atcagcagcttttttttttttttttttttttttagtaggg

SEQ ID NO: 74303 - DNA, 40 bp, Homo sapiens
ccctactaaaaaaaaaaaaaaaaaaaaaaaagctgctgat

SEQ ID NO: 74304 - DNA, 40 bp, Homo sapiens
tcagcagcttttttttttttttttttttttttagtaggga

SEQ ID NO: 74305 - DNA, 40 bp, Homo sapiens
tccctactaaaaaaaaaaaaaaaaaaaaaaaagctgctga

SEQ ID NO: 74306 - DNA, 40 bp, Homo sapiens
cagcagcttttttttttttttttttttttttagtagggag

SEQ ID NO: 74307 - DNA, 40 bp, Homo sapiens
ctccctactaaaaaaaaaaaaaaaaaaaaaaaagctgctg

SEQ ID NO: 74308 - DNA, 40 bp, Homo sapiens
agcagcttttttttttttttttttttttttagtagggaga

SEQ ID NO: 74309 - DNA, 40 bp, Homo sapiens
tctccctactaaaaaaaaaaaaaaaaaaaaaaaagctgct

SEQ ID NO: 74310 - DNA, 40 bp, Homo sapiens
gcagcttttttttttttttttttttttttagtagggagaa

SEQ ID NO: 74311 - DNA, 40 bp, Homo sapiens
ttctccctactaaaaaaaaaaaaaaaaaaaaaaaagctgc

SEQ ID NO: 74312 - DNA, 40 bp, Homo sapiens
cagcttttttttttttttttttttttttagtagggagaaa

SEQ ID NO: 74313 - DNA, 40 bp, Homo sapiens
tttctccctactaaaaaaaaaaaaaaaaaaaaaaaagctg

SEQ ID NO: 74314 - DNA, 40 bp, Homo sapiens
agcttttttttttttttttttttttttagtagggagaaaa

SEQ ID NO: 74315 - DNA, 40 bp, Homo sapiens
ttttctccctactaaaaaaaaaaaaaaaaaaaaaaaagct

SEQ ID NO: 74316 - DNA, 40 bp, Homo sapiens
gcttttttttttttttttttttttttagtagggagaaaaa

SEQ ID NO: 74317 - DNA, 40 bp, Homo sapiens
tttttctccctactaaaaaaaaaaaaaaaaaaaaaaaagc

SEQ ID NO: 74318 - DNA, 40 bp, Homo sapiens
cttttttttttttttttttttttttagtagggagaaaaag

SEQ ID NO: 74319 - DNA, 40 bp, Homo sapiens
ctttttctccctactaaaaaaaaaaaaaaaaaaaaaaaag

SEQ ID NO: 74320 - DNA, 40 bp, Homo sapiens
ttttttttttttttttttttttttagtagggagaaaaaga

SEQ ID NO: 74321 - DNA, 40 bp, Homo sapiens
tctttttctccctactaaaaaaaaaaaaaaaaaaaaaaaa

SEQ ID NO: 74322 - DNA, 40 bp, Homo sapiens
tttttttttttttttttttttttagtagggagaaaaagat

SEQ ID NO: 74323 - DNA, 40 bp, Homo sapiens
atctttttctccctactaaaaaaaaaaaaaaaaaaaaaaa

SEQ ID NO: 74324 - DNA, 40 bp, Homo sapiens
ttttttttttttttttttttttagtagggagaaaaagata

SEQ ID NO: 74325 - DNA, 40 bp, Homo sapiens
tatctttttctccctactaaaaaaaaaaaaaaaaaaaaaa

SEQ ID NO: 74326 - DNA, 40 bp, Homo sapiens
tttttttttttttttttttttagtagggagaaaaagatat

SEQ ID NO: 74327 - DNA, 40 bp, Homo sapiens
atatctttttctccctactaaaaaaaaaaaaaaaaaaaaa

SEQ ID NO: 74328 - DNA, 40 bp, Homo sapiens
ttttttttttttttttttttagtagggagaaaaagatatg

SEQ ID NO: 74329 - DNA, 40 bp, Homo sapiens
catatctttttctccctactaaaaaaaaaaaaaaaaaaaa

SEQ ID NO: 74330 - DNA, 40 bp, Homo sapiens
tttttttttttttttttttagtagggagaaaaagatatga

SEQ ID NO: 74331 - DNA, 40 bp, Homo sapiens
tcatatctttttctccctactaaaaaaaaaaaaaaaaaaa

SEQ ID NO: 74332 - DNA, 40 bp, Homo sapiens
ttttttttttttttttttagtagggagaaaaagatatgag

SEQ ID NO: 74333 - DNA, 40 bp, Homo sapiens
ctcatatctttttctccctactaaaaaaaaaaaaaaaaaa

SEQ ID NO: 74334 - DNA, 40 bp, Homo sapiens
tttttttttttttttttagtagggagaaaaagatatgagc

SEQ ID NO: 74335 - DNA, 40 bp, Homo sapiens
gctcatatctttttctccctactaaaaaaaaaaaaaaaaa

SEQ ID NO: 74336 - DNA, 40 bp, Homo sapiens
ttttttttttttttttagtagggagaaaaagatatgagct

SEQ ID NO: 74337 - DNA, 40 bp, Homo sapiens
agctcatatctttttctccctactaaaaaaaaaaaaaaaa

SEQ ID NO: 74338 - DNA, 40 bp, Homo sapiens
tttttttttttttttagtagggagaaaaagatatgagcta

SEQ ID NO: 74339 - DNA, 40 bp, Homo sapiens
tagctcatatctttttctccctactaaaaaaaaaaaaaaa

SEQ ID NO: 74340 - DNA, 40 bp, Homo sapiens
ttttttttttttttagtagggagaaaaagatatgagctat

SEQ ID NO: 74341 - DNA, 40 bp, Homo sapiens
atagctcatatctttttctccctactaaaaaaaaaaaaaa

SEQ ID NO: 74342 - DNA, 40 bp, Homo sapiens
tttttttttttttagtagggagaaaaagatatgagctata

SEQ ID NO: 74343 - DNA, 40 bp, Homo sapiens
tatagctcatatctttttctccctactaaaaaaaaaaaaa

SEQ ID NO: 74344 - DNA, 40 bp, Homo sapiens
ttttttttttttagtagggagaaaaagatatgagctatag

SEQ ID NO: 74345 - DNA, 40 bp, Homo sapiens
ctatagctcatatctttttctccctactaaaaaaaaaaaa

SEQ ID NO: 74346 - DNA, 40 bp, Homo sapiens
tttttttttttagtagggagaaaaagatatgagctatagt

SEQ ID NO: 74347 - DNA, 40 bp, Homo sapiens
actatagctcatatctttttctccctactaaaaaaaaaaa

SEQ ID NO: 74348 - DNA, 40 bp, Homo sapiens
ttttttttttagtagggagaaaaagatatgagctatagta

SEQ ID NO: 74349 - DNA, 40 bp, Homo sapiens
tactatagctcatatctttttctccctactaaaaaaaaaa

SEQ ID NO: 74350 - DNA, 40 bp, Homo sapiens
tttttttttagtagggagaaaaagatatgagctatagtag

SEQ ID NO: 74351 - DNA, 40 bp, Homo sapiens
ctactatagctcatatctttttctccctactaaaaaaaaa

SEQ ID NO: 74352 - DNA, 40 bp, Homo sapiens
ttttttttagtagggagaaaaagatatgagctatagtaga

SEQ ID NO: 74353 - DNA, 40 bp, Homo sapiens
tctactatagctcatatctttttctccctactaaaaaaaa

SEQ ID NO: 74354 - DNA, 40 bp, Homo sapiens
tttttttagtagggagaaaaagatatgagctatagtagac

SEQ ID NO: 74355 - DNA, 40 bp, Homo sapiens
gtctactatagctcatatctttttctccctactaaaaaaa

SEQ ID NO: 74356 - DNA, 40 bp, Homo sapiens
ttttttagtagggagaaaaagatatgagctatagtagaca

SEQ ID NO: 74357 - DNA, 40 bp, Homo sapiens
tgtctactatagctcatatctttttctccctactaaaaaa

SEQ ID NO: 74358 - DNA, 40 bp, Homo sapiens
tttttagtagggagaaaaagatatgagctatagtagacag

SEQ ID NO: 74359 - DNA, 40 bp, Homo sapiens
ctgtctactatagctcatatctttttctccctactaaaaa

SEQ ID NO: 74360 - DNA, 40 bp, Homo sapiens
ttttagtagggagaaaaagatatgagctatagtagacagc

SEQ ID NO: 74361 - DNA, 40 bp, Homo sapiens
gctgtctactatagctcatatctttttctccctactaaaa

SEQ ID NO: 74362 - DNA, 40 bp, Homo sapiens
tttagtagggagaaaaagatatgagctatagtagacagca

SEQ ID NO: 74363 - DNA, 40 bp, Homo sapiens
tgctgtctactatagctcatatctttttctccctactaaa

SEQ ID NO: 74364 - DNA, 40 bp, Homo sapiens
ttagtagggagaaaaagatatgagctatagtagacagcag

SEQ ID NO: 74365 - DNA, 40 bp, Homo sapiens
ctgctgtctactatagctcatatctttttctccctactaa

SEQ ID NO: 74366 - DNA, 40 bp, Homo sapiens
tagtagggagaaaaagatatgagctatagtagacagcagt

SEQ ID NO: 74367 - DNA, 40 bp, Homo sapiens
actgctgtctactatagctcatatctttttctccctacta

SEQ ID NO: 74368 - DNA, 40 bp, Homo sapiens
agtagggagaaaaagatatgagctatagtagacagcagta

SEQ ID NO: 74369 - DNA, 40 bp, Homo sapiens
tactgctgtctactatagctcatatctttttctccctact

SEQ ID NO: 74370 - DNA, 40 bp, Homo sapiens
gtagggagaaaaagatatgagctatagtagacagcagtaa

SEQ ID NO: 74371 - DNA, 40 bp, Homo sapiens
ttactgctgtctactatagctcatatctttttctccctac

SEQ ID NO: 74372 - DNA, 40 bp, Homo sapiens
tagggagaaaaagatatgagctatagtagacagcagtaat

SEQ ID NO: 74373 - DNA, 40 bp, Homo sapiens
attactgctgtctactatagctcatatctttttctcccta

SEQ ID NO: 74374 - DNA, 40 bp, Homo sapiens
agggagaaaaagatatgagctatagtagacagcagtaata

SEQ ID NO: 74375 - DNA, 40 bp, Homo sapiens
tattactgctgtctactatagctcatatctttttctccct

SEQ ID NO: 74376 - DNA, 40 bp, Homo sapiens
gggagaaaaagatatgagctatagtagacagcagtaatat

SEQ ID NO: 74377 - DNA, 40 bp, Homo sapiens
atattactgctgtctactatagctcatatctttttctccc

SEQ ID NO: 74378 - DNA, 40 bp, Homo sapiens
ggagaaaaagatatgagctatagtagacagcagtaatatt

SEQ ID NO: 74379 - DNA, 40 bp, Homo sapiens
aatattactgctgtctactatagctcatatctttttctcc

SEQ ID NO: 74380 - DNA, 40 bp, Homo sapiens
gagaaaaagatatgagctatagtagacagcagtaatattg

SEQ ID NO: 74381 - DNA, 40 bp, Homo sapiens
caatattactgctgtctactatagctcatatctttttctc

SEQ ID NO: 74382 - DNA, 40 bp, Homo sapiens
agaaaaagatatgagctatagtagacagcagtaatattga

SEQ ID NO: 74383 - DNA, 40 bp, Homo sapiens
tcaatattactgctgtctactatagctcatatctttttct

SEQ ID NO: 74384 - DNA, 40 bp, Homo sapiens
gaaaaagatatgagctatagtagacagcagtaatattgaa

SEQ ID NO: 74385 - DNA, 40 bp, Homo sapiens
ttcaatattactgctgtctactatagctcatatctttttc

SEQ ID NO: 74386 - DNA, 40 bp, Homo sapiens
aaaaagatatgagctatagtagacagcagtaatattgaat

SEQ ID NO: 74387 - DNA, 40 bp, Homo sapiens
attcaatattactgctgtctactatagctcatatcttttt

SEQ ID NO: 74388 - DNA, 40 bp, Homo sapiens
aaaagatatgagctatagtagacagcagtaatattgaatg

SEQ ID NO: 74389 - DNA, 40 bp, Homo sapiens
cattcaatattactgctgtctactatagctcatatctttt

SEQ ID NO: 74390 - DNA, 40 bp, Homo sapiens
aaagatatgagctatagtagacagcagtaatattgaatgg

SEQ ID NO: 74391 - DNA, 40 bp, Homo sapiens
ccattcaatattactgctgtctactatagctcatatcttt

SEQ ID NO: 74392 - DNA, 40 bp, Homo sapiens
aagatatgagctatagtagacagcagtaatattgaatggc

SEQ ID NO: 74393 - DNA, 40 bp, Homo sapiens
gccattcaatattactgctgtctactatagctcatatctt

SEQ ID NO: 74394 - DNA, 40 bp, Homo sapiens
agatatgagctatagtagacagcagtaatattgaatggcc

SEQ ID NO: 74395 - DNA, 40 bp, Homo sapiens
ggccattcaatattactgctgtctactatagctcatatct

SEQ ID NO: 74396 - DNA, 40 bp, Homo sapiens
gatatgagctatagtagacagcagtaatattgaatggccc

SEQ ID NO: 74397 - DNA, 40 bp, Homo sapiens
gggccattcaatattactgctgtctactatagctcatatc

SEQ ID NO: 74398 - DNA, 40 bp, Homo sapiens
atatgagctatagtagacagcagtaatattgaatggccca

SEQ ID NO: 74399 - DNA, 40 bp, Homo sapiens
tgggccattcaatattactgctgtctactatagctcatat

SEQ ID NO: 74400 - DNA, 40 bp, Homo sapiens
tatgagctatagtagacagcagtaatattgaatggcccag

SEQ ID NO: 74401 - DNA, 40 bp, Homo sapiens
ctgggccattcaatattactgctgtctactatagctcata

SEQ ID NO: 74402 - DNA, 40 bp, Homo sapiens
atgagctatagtagacagcagtaatattgaatggcccaga

SEQ ID NO: 74403 - DNA, 40 bp, Homo sapiens
tctgggccattcaatattactgctgtctactatagctcat

SEQ ID NO: 74404 - DNA, 40 bp, Homo sapiens
tgagctatagtagacagcagtaatattgaatggcccagaa

SEQ ID NO: 74405 - DNA, 40 bp, Homo sapiens
ttctgggccattcaatattactgctgtctactatagctca

SEQ ID NO: 74406 - DNA, 40 bp, Homo sapiens
gagctatagtagacagcagtaatattgaatggcccagaag

SEQ ID NO: 74407 - DNA, 40 bp, Homo sapiens
cttctgggccattcaatattactgctgtctactatagctc

SEQ ID NO: 74408 - DNA, 40 bp, Homo sapiens
agctatagtagacagcagtaatattgaatggcccagaagg

SEQ ID NO: 74409 - DNA, 40 bp, Homo sapiens
ccttctgggccattcaatattactgctgtctactatagct

SEQ ID NO: 74410 - DNA, 40 bp, Homo sapiens
gctatagtagacagcagtaatattgaatggcccagaaggt

SEQ ID NO: 74411 - DNA, 40 bp, Homo sapiens
accttctgggccattcaatattactgctgtctactatagc

SEQ ID NO: 74412 - DNA, 40 bp, Homo sapiens
ctatagtagacagcagtaatattgaatggcccagaaggtg

SEQ ID NO: 74413 - DNA, 40 bp, Homo sapiens
caccttctgggccattcaatattactgctgtctactatag

SEQ ID NO: 74414 - DNA, 40 bp, Homo sapiens
tatagtagacagcagtaatattgaatggcccagaaggtgg

SEQ ID NO: 74415 - DNA, 40 bp, Homo sapiens
ccaccttctgggccattcaatattactgctgtctactata

SEQ ID NO: 74416 - DNA, 40 bp, Homo sapiens
atagtagacagcagtaatattgaatggcccagaaggtggg

SEQ ID NO: 74417 - DNA, 40 bp, Homo sapiens
cccaccttctgggccattcaatattactgctgtctactat

SEQ ID NO: 74418 - DNA, 40 bp, Homo sapiens
tagtagacagcagtaatattgaatggcccagaaggtggga

SEQ ID NO: 74419 - DNA, 40 bp, Homo sapiens
tcccaccttctgggccattcaatattactgctgtctacta

SEQ ID NO: 74420 - DNA, 40 bp, Homo sapiens
agtagacagcagtaatattgaatggcccagaaggtgggaa

SEQ ID NO: 74421 - DNA, 40 bp, Homo sapiens
ttcccaccttctgggccattcaatattactgctgtctact

SEQ ID NO: 74422 - DNA, 40 bp, Homo sapiens
gtagacagcagtaatattgaatggcccagaaggtgggaaa

SEQ ID NO: 74423 - DNA, 40 bp, Homo sapiens
tttcccaccttctgggccattcaatattactgctgtctac

SEQ ID NO: 74424 - DNA, 40 bp, Homo sapiens
tagacagcagtaatattgaatggcccagaaggtgggaaaa

SEQ ID NO: 74425 - DNA, 40 bp, Homo sapiens
ttttcccaccttctgggccattcaatattactgctgtcta

SEQ ID NO: 74426 - DNA, 40 bp, Homo sapiens
agacagcagtaatattgaatggcccagaaggtgggaaaaa

SEQ ID NO: 74427 - DNA, 40 bp, Homo sapiens
tttttcccaccttctgggccattcaatattactgctgtct

SEQ ID NO: 74428 - DNA, 40 bp, Homo sapiens
gacagcagtaatattgaatggcccagaaggtgggaaaaag

SEQ ID NO: 74429 - DNA, 40 bp, Homo sapiens
ctttttcccaccttctgggccattcaatattactgctgtc

SEQ ID NO: 74430 - DNA, 40 bp, Homo sapiens
acagcagtaatattgaatggcccagaaggtgggaaaaagc

SEQ ID NO: 74431 - DNA, 40 bp, Homo sapiens
gctttttcccaccttctgggccattcaatattactgctgt

SEQ ID NO: 74432 - DNA, 40 bp, Homo sapiens
cagcagtaatattgaatggcccagaaggtgggaaaaagcc

SEQ ID NO: 74433 - DNA, 40 bp, Homo sapiens
ggctttttcccaccttctgggccattcaatattactgctg

SEQ ID NO: 74434 - DNA, 40 bp, Homo sapiens
agcagtaatattgaatggcccagaaggtgggaaaaagcca

SEQ ID NO: 74435 - DNA, 40 bp, Homo sapiens
tggctttttcccaccttctgggccattcaatattactgct

SEQ ID NO: 74436 - DNA, 40 bp, Homo sapiens
gcagtaatattgaatggcccagaaggtgggaaaaagccac

SEQ ID NO: 74437 - DNA, 40 bp, Homo sapiens
gtggctttttcccaccttctgggccattcaatattactgc

SEQ ID NO: 74438 - DNA, 40 bp, Homo sapiens
cagtaatattgaatggcccagaaggtgggaaaaagccact

SEQ ID NO: 74439 - DNA, 40 bp, Homo sapiens
agtggctttttcccaccttctgggccattcaatattactg

SEQ ID NO: 74440 - DNA, 40 bp, Homo sapiens
agtaatattgaatggcccagaaggtgggaaaaagccactc

SEQ ID NO: 74441 - DNA, 40 bp, Homo sapiens
gagtggctttttcccaccttctgggccattcaatattact

SEQ ID NO: 74442 - DNA, 40 bp, Homo sapiens
gtaatattgaatggcccagaaggtgggaaaaagccactct

SEQ ID NO: 74443 - DNA, 40 bp, Homo sapiens
agagtggctttttcccaccttctgggccattcaatattac

SEQ ID NO: 74444 - DNA, 40 bp, Homo sapiens
taatattgaatggcccagaaggtgggaaaaagccactctt

SEQ ID NO: 74445 - DNA, 40 bp, Homo sapiens
aagagtggctttttcccaccttctgggccattcaatatta

SEQ ID NO: 74446 - DNA, 40 bp, Homo sapiens
aatattgaatggcccagaaggtgggaaaaagccactctta

SEQ ID NO: 74447 - DNA, 40 bp, Homo sapiens
taagagtggctttttcccaccttctgggccattcaatatt

SEQ ID NO: 74448 - DNA, 40 bp, Homo sapiens
atattgaatggcccagaaggtgggaaaaagccactcttaa

SEQ ID NO: 74449 - DNA, 40 bp, Homo sapiens
ttaagagtggctttttcccaccttctgggccattcaatat

SEQ ID NO: 74450 - DNA, 40 bp, Homo sapiens
tattgaatggcccagaaggtgggaaaaagccactcttaaa

SEQ ID NO: 74451 - DNA, 40 bp, Homo sapiens
tttaagagtggctttttcccaccttctgggccattcaata

SEQ ID NO: 74452 - DNA, 40 bp, Homo sapiens
attgaatggcccagaaggtgggaaaaagccactcttaaat

SEQ ID NO: 74453 - DNA, 40 bp, Homo sapiens
atttaagagtggctttttcccaccttctgggccattcaat

SEQ ID NO: 74454 - DNA, 40 bp, Homo sapiens
ttgaatggcccagaaggtgggaaaaagccactcttaaatg

SEQ ID NO: 74455 - DNA, 40 bp, Homo sapiens
catttaagagtggctttttcccaccttctgggccattcaa

SEQ ID NO: 74456 - DNA, 40 bp, Homo sapiens
tgaatggcccagaaggtgggaaaaagccactcttaaatgt

SEQ ID NO: 74457 - DNA, 40 bp, Homo sapiens
acatttaagagtggctttttcccaccttctgggccattca

SEQ ID NO: 74458 - DNA, 40 bp, Homo sapiens
gaatggcccagaaggtgggaaaaagccactcttaaatgta

SEQ ID NO: 74459 - DNA, 40 bp, Homo sapiens
tacatttaagagtggctttttcccaccttctgggccattc

SEQ ID NO: 74460 - DNA, 40 bp, Homo sapiens
aatggcccagaaggtgggaaaaagccactcttaaatgtat

SEQ ID NO: 74461 - DNA, 40 bp, Homo sapiens
atacatttaagagtggctttttcccaccttctgggccatt

SEQ ID NO: 74462 - DNA, 40 bp, Homo sapiens
atggcccagaaggtgggaaaaagccactcttaaatgtatt

SEQ ID NO: 74463 - DNA, 40 bp, Homo sapiens
aatacatttaagagtggctttttcccaccttctgggccat

SEQ ID NO: 74464 - DNA, 40 bp, Homo sapiens
tggcccagaaggtgggaaaaagccactcttaaatgtattt

SEQ ID NO: 74465 - DNA, 40 bp, Homo sapiens
aaatacatttaagagtggctttttcccaccttctgggcca

SEQ ID NO: 74466 - DNA, 40 bp, Homo sapiens
ggcccagaaggtgggaaaaagccactcttaaatgtatttt

SEQ ID NO: 74467 - DNA, 40 bp, Homo sapiens
aaaatacatttaagagtggctttttcccaccttctgggcc

SEQ ID NO: 74468 - DNA, 40 bp, Homo sapiens
gcccagaaggtgggaaaaagccactcttaaatgtattttt

SEQ ID NO: 74469 - DNA, 40 bp, Homo sapiens
aaaaatacatttaagagtggctttttcccaccttctgggc

SEQ ID NO: 74470 - DNA, 40 bp, Homo sapiens
cccagaaggtgggaaaaagccactcttaaatgtatttttt

SEQ ID NO: 74471 - DNA, 40 bp, Homo sapiens
aaaaaatacatttaagagtggctttttcccaccttctggg

SEQ ID NO: 74472 - DNA, 40 bp, Homo sapiens
ccagaaggtgggaaaaagccactcttaaatgtattttttc

SEQ ID NO: 74473 - DNA, 40 bp, Homo sapiens
gaaaaaatacatttaagagtggctttttcccaccttctgg

SEQ ID NO: 74474 - DNA, 40 bp, Homo sapiens
cagaaggtgggaaaaagccactcttaaatgtattttttct

SEQ ID NO: 74475 - DNA, 40 bp, Homo sapiens
agaaaaaatacatttaagagtggctttttcccaccttctg

SEQ ID NO: 74476 - DNA, 40 bp, Homo sapiens
agaaggtgggaaaaagccactcttaaatgtattttttctt

SEQ ID NO: 74477 - DNA, 40 bp, Homo sapiens
aagaaaaaatacatttaagagtggctttttcccaccttct

SEQ ID NO: 74478 - DNA, 40 bp, Homo sapiens
gaaggtgggaaaaagccactcttaaatgtattttttcttt

SEQ ID NO: 74479 - DNA, 40 bp, Homo sapiens
aaagaaaaaatacatttaagagtggctttttcccaccttc

SEQ ID NO: 74480 - DNA, 40 bp, Homo sapiens
aaggtgggaaaaagccactcttaaatgtattttttctttt

SEQ ID NO: 74481 - DNA, 40 bp, Homo sapiens
aaaagaaaaaatacatttaagagtggctttttcccacctt

SEQ ID NO: 74482 - DNA, 40 bp, Homo sapiens
aggtgggaaaaagccactcttaaatgtattttttcttttg

SEQ ID NO: 74483 - DNA, 40 bp, Homo sapiens
caaaagaaaaaatacatttaagagtggctttttcccacct

SEQ ID NO: 74484 - DNA, 40 bp, Homo sapiens
ggtgggaaaaagccactcttaaatgtattttttcttttgg

SEQ ID NO: 74485 - DNA, 40 bp, Homo sapiens
ccaaaagaaaaaatacatttaagagtggctttttcccacc

SEQ ID NO: 74486 - DNA, 40 bp, Homo sapiens
gtgggaaaaagccactcttaaatgtattttttcttttgga

SEQ ID NO: 74487 - DNA, 40 bp, Homo sapiens
tccaaaagaaaaaatacatttaagagtggctttttcccac

SEQ ID NO: 74488 - DNA, 40 bp, Homo sapiens
tgggaaaaagccactcttaaatgtattttttcttttggat

SEQ ID NO: 74489 - DNA, 40 bp, Homo sapiens
atccaaaagaaaaaatacatttaagagtggctttttccca

SEQ ID NO: 74490 - DNA, 40 bp, Homo sapiens
gggaaaaagccactcttaaatgtattttttcttttggata

SEQ ID NO: 74491 - DNA, 40 bp, Homo sapiens
tatccaaaagaaaaaatacatttaagagtggctttttccc

SEQ ID NO: 74492 - DNA, 40 bp, Homo sapiens
ggaaaaagccactcttaaatgtattttttcttttggatat

SEQ ID NO: 74493 - DNA, 40 bp, Homo sapiens
atatccaaaagaaaaaatacatttaagagtggctttttcc

SEQ ID NO: 74494 - DNA, 40 bp, Homo sapiens
gaaaaagccactcttaaatgtattttttcttttggatatt

SEQ ID NO: 74495 - DNA, 40 bp, Homo sapiens
aatatccaaaagaaaaaatacatttaagagtggctttttc

SEQ ID NO: 74496 - DNA, 40 bp, Homo sapiens
aaaaagccactcttaaatgtattttttcttttggatattt

SEQ ID NO: 74497 - DNA, 40 bp, Homo sapiens
aaatatccaaaagaaaaaatacatttaagagtggcttttt

SEQ ID NO: 74498 - DNA, 40 bp, Homo sapiens
aaaagccactcttaaatgtattttttcttttggatatttt

SEQ ID NO: 74499 - DNA, 40 bp, Homo sapiens
aaaatatccaaaagaaaaaatacatttaagagtggctttt

SEQ ID NO: 74500 - DNA, 40 bp, Homo sapiens
aaagccactcttaaatgtattttttcttttggatatttta

SEQ ID NO: 74501 - DNA, 40 bp, Homo sapiens
taaaatatccaaaagaaaaaatacatttaagagtggcttt

SEQ ID NO: 74502 - DNA, 40 bp, Homo sapiens
aagccactcttaaatgtattttttcttttggatattttac

SEQ ID NO: 74503 - DNA, 40 bp, Homo sapiens
gtaaaatatccaaaagaaaaaatacatttaagagtggctt

SEQ ID NO: 74504 - DNA, 40 bp, Homo sapiens
agccactcttaaatgtattttttcttttggatattttaca

SEQ ID NO: 74505 - DNA, 40 bp, Homo sapiens
tgtaaaatatccaaaagaaaaaatacatttaagagtggct

SEQ ID NO: 74506 - DNA, 40 bp, Homo sapiens
gccactcttaaatgtattttttcttttggatattttacaa

SEQ ID NO: 74507 - DNA, 40 bp, Homo sapiens
ttgtaaaatatccaaaagaaaaaatacatttaagagtggc

SEQ ID NO: 74508 - DNA, 40 bp, Homo sapiens
ccactcttaaatgtattttttcttttggatattttacaag

SEQ ID NO: 74509 - DNA, 40 bp, Homo sapiens
cttgtaaaatatccaaaagaaaaaatacatttaagagtgg

SEQ ID NO: 74510 - DNA, 40 bp, Homo sapiens
cactcttaaatgtattttttcttttggatattttacaagc

SEQ ID NO: 74511 - DNA, 40 bp, Homo sapiens
gcttgtaaaatatccaaaagaaaaaatacatttaagagtg

SEQ ID NO: 74512 - DNA, 40 bp, Homo sapiens
actcttaaatgtattttttcttttggatattttacaagca

SEQ ID NO: 74513 - DNA, 40 bp, Homo sapiens
tgcttgtaaaatatccaaaagaaaaaatacatttaagagt

SEQ ID NO: 74514 - DNA, 40 bp, Homo sapiens
ctcttaaatgtattttttcttttggatattttacaagcaa

SEQ ID NO: 74515 - DNA, 40 bp, Homo sapiens
ttgcttgtaaaatatccaaaagaaaaaatacatttaagag

SEQ ID NO: 74516 - DNA, 40 bp, Homo sapiens
tcttaaatgtattttttcttttggatattttacaagcaaa

SEQ ID NO: 74517 - DNA, 40 bp, Homo sapiens
tttgcttgtaaaatatccaaaagaaaaaatacatttaaga

SEQ ID NO: 74518 - DNA, 40 bp, Homo sapiens
cttaaatgtattttttcttttggatattttacaagcaaat

SEQ ID NO: 74519 - DNA, 40 bp, Homo sapiens
atttgcttgtaaaatatccaaaagaaaaaatacatttaag

SEQ ID NO: 74520 - DNA, 40 bp, Homo sapiens
ttaaatgtattttttcttttggatattttacaagcaaata

SEQ ID NO: 74521 - DNA, 40 bp, Homo sapiens
tatttgcttgtaaaatatccaaaagaaaaaatacatttaa

SEQ ID NO: 74522 - DNA, 40 bp, Homo sapiens
taaatgtattttttcttttggatattttacaagcaaataa

SEQ ID NO: 74523 - DNA, 40 bp, Homo sapiens
ttatttgcttgtaaaatatccaaaagaaaaaatacattta

SEQ ID NO: 74524 - DNA, 40 bp, Homo sapiens
aaatgtattttttcttttggatattttacaagcaaataat

SEQ ID NO: 74525 - DNA, 40 bp, Homo sapiens
attatttgcttgtaaaatatccaaaagaaaaaatacattt

SEQ ID NO: 74526 - DNA, 40 bp, Homo sapiens
aatgtattttttcttttggatattttacaagcaaataata

SEQ ID NO: 74527 - DNA, 40 bp, Homo sapiens
tattatttgcttgtaaaatatccaaaagaaaaaatacatt

SEQ ID NO: 74528 - DNA, 40 bp, Homo sapiens
atgtattttttcttttggatattttacaagcaaataataa

SEQ ID NO: 74529 - DNA, 40 bp, Homo sapiens
ttattatttgcttgtaaaatatccaaaagaaaaaatacat

SEQ ID NO: 74530 - DNA, 40 bp, Homo sapiens
tgtattttttcttttggatattttacaagcaaataataac

SEQ ID NO: 74531 - DNA, 40 bp, Homo sapiens
gttattatttgcttgtaaaatatccaaaagaaaaaataca

SEQ ID NO: 74532 - DNA, 40 bp, Homo sapiens
gtattttttcttttggatattttacaagcaaataataact

SEQ ID NO: 74533 - DNA, 40 bp, Homo sapiens
agttattatttgcttgtaaaatatccaaaagaaaaaatac

SEQ ID NO: 74534 - DNA, 40 bp, Homo sapiens
tattttttcttttggatattttacaagcaaataataactt

SEQ ID NO: 74535 - DNA, 40 bp, Homo sapiens
aagttattatttgcttgtaaaatatccaaaagaaaaaata

SEQ ID NO: 74536 - DNA, 40 bp, Homo sapiens
attttttcttttggatattttacaagcaaataataacttc

SEQ ID NO: 74537 - DNA, 40 bp, Homo sapiens
gaagttattatttgcttgtaaaatatccaaaagaaaaaat

SEQ ID NO: 74538 - DNA, 40 bp, Homo sapiens
ttttttcttttggatattttacaagcaaataataacttct

SEQ ID NO: 74539 - DNA, 40 bp, Homo sapiens
agaagttattatttgcttgtaaaatatccaaaagaaaaaa

SEQ ID NO: 74540 - DNA, 40 bp, Homo sapiens
tttttcttttggatattttacaagcaaataataacttctg

SEQ ID NO: 74541 - DNA, 40 bp, Homo sapiens
cagaagttattatttgcttgtaaaatatccaaaagaaaaa

SEQ ID NO: 74542 - DNA, 40 bp, Homo sapiens
ttttcttttggatattttacaagcaaataataacttctgc

SEQ ID NO: 74543 - DNA, 40 bp, Homo sapiens
gcagaagttattatttgcttgtaaaatatccaaaagaaaa

SEQ ID NO: 74544 - DNA, 40 bp, Homo sapiens
tttcttttggatattttacaagcaaataataacttctgcc

SEQ ID NO: 74545 - DNA, 40 bp, Homo sapiens
ggcagaagttattatttgcttgtaaaatatccaaaagaaa

SEQ ID NO: 74546 - DNA, 40 bp, Homo sapiens
ttcttttggatattttacaagcaaataataacttctgcct

SEQ ID NO: 74547 - DNA, 40 bp, Homo sapiens
aggcagaagttattatttgcttgtaaaatatccaaaagaa

SEQ ID NO: 74548 - DNA, 40 bp, Homo sapiens
tcttttggatattttacaagcaaataataacttctgccta

SEQ ID NO: 74549 - DNA, 40 bp, Homo sapiens
taggcagaagttattatttgcttgtaaaatatccaaaaga

SEQ ID NO: 74550 - DNA, 40 bp, Homo sapiens
cttttggatattttacaagcaaataataacttctgcctaa

SEQ ID NO: 74551 - DNA, 40 bp, Homo sapiens
ttaggcagaagttattatttgcttgtaaaatatccaaaag

SEQ ID NO: 74552 - DNA, 40 bp, Homo sapiens
ttttggatattttacaagcaaataataacttctgcctaag

SEQ ID NO: 74553 - DNA, 40 bp, Homo sapiens
cttaggcagaagttattatttgcttgtaaaatatccaaaa

SEQ ID NO: 74554 - DNA, 40 bp, Homo sapiens
tttggatattttacaagcaaataataacttctgcctaagt

SEQ ID NO: 74555 - DNA, 40 bp, Homo sapiens
acttaggcagaagttattatttgcttgtaaaatatccaaa

SEQ ID NO: 74556 - DNA, 40 bp, Homo sapiens
ttggatattttacaagcaaataataacttctgcctaagtt

SEQ ID NO: 74557 - DNA, 40 bp, Homo sapiens
aacttaggcagaagttattatttgcttgtaaaatatccaa

SEQ ID NO: 74558 - DNA, 40 bp, Homo sapiens
tggatattttacaagcaaataataacttctgcctaagttc

SEQ ID NO: 74559 - DNA, 40 bp, Homo sapiens
gaacttaggcagaagttattatttgcttgtaaaatatcca

SEQ ID NO: 74560 - DNA, 40 bp, Homo sapiens
ggatattttacaagcaaataataacttctgcctaagttcg

SEQ ID NO: 74561 - DNA, 40 bp, Homo sapiens
cgaacttaggcagaagttattatttgcttgtaaaatatcc

SEQ ID NO: 74562 - DNA, 40 bp, Homo sapiens
gatattttacaagcaaataataacttctgcctaagttcgc

SEQ ID NO: 74563 - DNA, 40 bp, Homo sapiens
gcgaacttaggcagaagttattatttgcttgtaaaatatc

SEQ ID NO: 74564 - DNA, 40 bp, Homo sapiens
atattttacaagcaaataataacttctgcctaagttcgcc

SEQ ID NO: 74565 - DNA, 40 bp, Homo sapiens
ggcgaacttaggcagaagttattatttgcttgtaaaatat

SEQ ID NO: 74566 - DNA, 40 bp, Homo sapiens
tattttacaagcaaataataacttctgcctaagttcgcca

SEQ ID NO: 74567 - DNA, 40 bp, Homo sapiens
tggcgaacttaggcagaagttattatttgcttgtaaaata

SEQ ID NO: 74568 - DNA, 40 bp, Homo sapiens
attttacaagcaaataataacttctgcctaagttcgccat

SEQ ID NO: 74569 - DNA, 40 bp, Homo sapiens
atggcgaacttaggcagaagttattatttgcttgtaaaat

SEQ ID NO: 74570 - DNA, 40 bp, Homo sapiens
ttttacaagcaaataataacttctgcctaagttcgccatc

SEQ ID NO: 74571 - DNA, 40 bp, Homo sapiens
gatggcgaacttaggcagaagttattatttgcttgtaaaa

SEQ ID NO: 74572 - DNA, 40 bp, Homo sapiens
tttacaagcaaataataacttctgcctaagttcgccatct

SEQ ID NO: 74573 - DNA, 40 bp, Homo sapiens
agatggcgaacttaggcagaagttattatttgcttgtaaa

SEQ ID NO: 74574 - DNA, 40 bp, Homo sapiens
ttacaagcaaataataacttctgcctaagttcgccatctc

SEQ ID NO: 74575 - DNA, 40 bp, Homo sapiens
gagatggcgaacttaggcagaagttattatttgcttgtaa

SEQ ID NO: 74576 - DNA, 40 bp, Homo sapiens
tacaagcaaataataacttctgcctaagttcgccatctca

SEQ ID NO: 74577 - DNA, 40 bp, Homo sapiens
tgagatggcgaacttaggcagaagttattatttgcttgta

SEQ ID NO: 74578 - DNA, 40 bp, Homo sapiens
acaagcaaataataacttctgcctaagttcgccatctcag

SEQ ID NO: 74579 - DNA, 40 bp, Homo sapiens
ctgagatggcgaacttaggcagaagttattatttgcttgt

SEQ ID NO: 74580 - DNA, 40 bp, Homo sapiens
caagcaaataataacttctgcctaagttcgccatctcagt

SEQ ID NO: 74581 - DNA, 40 bp, Homo sapiens
actgagatggcgaacttaggcagaagttattatttgcttg

SEQ ID NO: 74582 - DNA, 40 bp, Homo sapiens
aagcaaataataacttctgcctaagttcgccatctcagtg

SEQ ID NO: 74583 - DNA, 40 bp, Homo sapiens
cactgagatggcgaacttaggcagaagttattatttgctt

SEQ ID NO: 74584 - DNA, 40 bp, Homo sapiens
agcaaataataacttctgcctaagttcgccatctcagtgg

SEQ ID NO: 74585 - DNA, 40 bp, Homo sapiens
ccactgagatggcgaacttaggcagaagttattatttgct

SEQ ID NO: 74586 - DNA, 40 bp, Homo sapiens
gcaaataataacttctgcctaagttcgccatctcagtggc

SEQ ID NO: 74587 - DNA, 40 bp, Homo sapiens
gccactgagatggcgaacttaggcagaagttattatttgc

SEQ ID NO: 74588 - DNA, 40 bp, Homo sapiens
caaataataacttctgcctaagttcgccatctcagtggca

SEQ ID NO: 74589 - DNA, 40 bp, Homo sapiens
tgccactgagatggcgaacttaggcagaagttattatttg

SEQ ID NO: 74590 - DNA, 40 bp, Homo sapiens
aaataataacttctgcctaagttcgccatctcagtggcat

SEQ ID NO: 74591 - DNA, 40 bp, Homo sapiens
atgccactgagatggcgaacttaggcagaagttattattt

SEQ ID NO: 74592 - DNA, 40 bp, Homo sapiens
aataataacttctgcctaagttcgccatctcagtggcatc

SEQ ID NO: 74593 - DNA, 40 bp, Homo sapiens
gatgccactgagatggcgaacttaggcagaagttattatt

SEQ ID NO: 74594 - DNA, 40 bp, Homo sapiens
ataataacttctgcctaagttcgccatctcagtggcatca

SEQ ID NO: 74595 - DNA, 40 bp, Homo sapiens
tgatgccactgagatggcgaacttaggcagaagttattat

SEQ ID NO: 74596 - DNA, 40 bp, Homo sapiens
taataacttctgcctaagttcgccatctcagtggcatcag

SEQ ID NO: 74597 - DNA, 40 bp, Homo sapiens
ctgatgccactgagatggcgaacttaggcagaagttatta

SEQ ID NO: 74598 - DNA, 40 bp, Homo sapiens
aataacttctgcctaagttcgccatctcagtggcatcagc

SEQ ID NO: 74599 - DNA, 40 bp, Homo sapiens
gctgatgccactgagatggcgaacttaggcagaagttatt

SEQ ID NO: 74600 - DNA, 40 bp, Homo sapiens
ataacttctgcctaagttcgccatctcagtggcatcagca

SEQ ID NO: 74601 - DNA, 40 bp, Homo sapiens
tgctgatgccactgagatggcgaacttaggcagaagttat

SEQ ID NO: 74602 - DNA, 40 bp, Homo sapiens
taacttctgcctaagttcgccatctcagtggcatcagcag

SEQ ID NO: 74603 - DNA, 40 bp, Homo sapiens
ctgctgatgccactgagatggcgaacttaggcagaagtta

SEQ ID NO: 74604 - DNA, 40 bp, Homo sapiens
aacttctgcctaagttcgccatctcagtggcatcagcagc

SEQ ID NO: 74605 - DNA, 40 bp, Homo sapiens
gctgctgatgccactgagatggcgaacttaggcagaagtt

SEQ ID NO: 74606 - DNA, 40 bp, Homo sapiens
acttctgcctaagttcgccatctcagtggcatcagcagca

SEQ ID NO: 74607 - DNA, 40 bp, Homo sapiens
tgctgctgatgccactgagatggcgaacttaggcagaagt

SEQ ID NO: 74608 - DNA, 40 bp, Homo sapiens
cttctgcctaagttcgccatctcagtggcatcagcagcac

SEQ ID NO: 74609 - DNA, 40 bp, Homo sapiens
gtgctgctgatgccactgagatggcgaacttaggcagaag

SEQ ID NO: 74610 - DNA, 40 bp, Homo sapiens
ttctgcctaagttcgccatctcagtggcatcagcagcaca

SEQ ID NO: 74611 - DNA, 40 bp, Homo sapiens
tgtgctgctgatgccactgagatggcgaacttaggcagaa

SEQ ID NO: 74612 - DNA, 40 bp, Homo sapiens
tctgcctaagttcgccatctcagtggcatcagcagcacag

SEQ ID NO: 74613 - DNA, 40 bp, Homo sapiens
ctgtgctgctgatgccactgagatggcgaacttaggcaga

SEQ ID NO: 74614 - DNA, 40 bp, Homo sapiens
ctgcctaagttcgccatctcagtggcatcagcagcacagc

SEQ ID NO: 74615 - DNA, 40 bp, Homo sapiens
gctgtgctgctgatgccactgagatggcgaacttaggcag

SEQ ID NO: 74616 - DNA, 40 bp, Homo sapiens
tgcctaagttcgccatctcagtggcatcagcagcacagca

SEQ ID NO: 74617 - DNA, 40 bp, Homo sapiens
tgctgtgctgctgatgccactgagatggcgaacttaggca

SEQ ID NO: 74618 - DNA, 40 bp, Homo sapiens
gcctaagttcgccatctcagtggcatcagcagcacagcac

SEQ ID NO: 74619 - DNA, 40 bp, Homo sapiens
gtgctgtgctgctgatgccactgagatggcgaacttaggc

SEQ ID NO: 74620 - DNA, 40 bp, Homo sapiens
cctaagttcgccatctcagtggcatcagcagcacagcact

SEQ ID NO: 74621 - DNA, 40 bp, Homo sapiens
agtgctgtgctgctgatgccactgagatggcgaacttagg

SEQ ID NO: 74622 - DNA, 40 bp, Homo sapiens
ctaagttcgccatctcagtggcatcagcagcacagcactt

SEQ ID NO: 74623 - DNA, 40 bp, Homo sapiens
aagtgctgtgctgctgatgccactgagatggcgaacttag

SEQ ID NO: 74624 - DNA, 40 bp, Homo sapiens
taagttcgccatctcagtggcatcagcagcacagcacttt

SEQ ID NO: 74625 - DNA, 40 bp, Homo sapiens
aaagtgctgtgctgctgatgccactgagatggcgaactta

SEQ ID NO: 74626 - DNA, 40 bp, Homo sapiens
aagttcgccatctcagtggcatcagcagcacagcactttc

SEQ ID NO: 74627 - DNA, 40 bp, Homo sapiens
gaaagtgctgtgctgctgatgccactgagatggcgaactt

SEQ ID NO: 74628 - DNA, 40 bp, Homo sapiens
agttcgccatctcagtggcatcagcagcacagcactttct

SEQ ID NO: 74629 - DNA, 40 bp, Homo sapiens
agaaagtgctgtgctgctgatgccactgagatggcgaact

SEQ ID NO: 74630 - DNA, 40 bp, Homo sapiens
gttcgccatctcagtggcatcagcagcacagcactttctt

SEQ ID NO: 74631 - DNA, 40 bp, Homo sapiens
aagaaagtgctgtgctgctgatgccactgagatggcgaac

SEQ ID NO: 74632 - DNA, 40 bp, Homo sapiens
ttcgccatctcagtggcatcagcagcacagcactttctta

SEQ ID NO: 74633 - DNA, 40 bp, Homo sapiens
taagaaagtgctgtgctgctgatgccactgagatggcgaa

SEQ ID NO: 74634 - DNA, 40 bp, Homo sapiens
tcgccatctcagtggcatcagcagcacagcactttcttat

SEQ ID NO: 74635 - DNA, 40 bp, Homo sapiens
ataagaaagtgctgtgctgctgatgccactgagatggcga

SEQ ID NO: 74636 - DNA, 40 bp, Homo sapiens
cgccatctcagtggcatcagcagcacagcactttcttatc

SEQ ID NO: 74637 - DNA, 40 bp, Homo sapiens
gataagaaagtgctgtgctgctgatgccactgagatggcg

SEQ ID NO: 74638 - DNA, 40 bp, Homo sapiens
gccatctcagtggcatcagcagcacagcactttcttatcc

SEQ ID NO: 74639 - DNA, 40 bp, Homo sapiens
ggataagaaagtgctgtgctgctgatgccactgagatggc

SEQ ID NO: 74640 - DNA, 40 bp, Homo sapiens
ccatctcagtggcatcagcagcacagcactttcttatccc

SEQ ID NO: 74641 - DNA, 40 bp, Homo sapiens
gggataagaaagtgctgtgctgctgatgccactgagatgg

SEQ ID NO: 74642 - DNA, 40 bp, Homo sapiens
catctcagtggcatcagcagcacagcactttcttatccca

SEQ ID NO: 74643 - DNA, 40 bp, Homo sapiens
tgggataagaaagtgctgtgctgctgatgccactgagatg

SEQ ID NO: 74644 - DNA, 40 bp, Homo sapiens
atctcagtggcatcagcagcacagcactttcttatcccag

SEQ ID NO: 74645 - DNA, 40 bp, Homo sapiens
ctgggataagaaagtgctgtgctgctgatgccactgagat

SEQ ID NO: 74646 - DNA, 40 bp, Homo sapiens
tctcagtggcatcagcagcacagcactttcttatcccagt

SEQ ID NO: 74647 - DNA, 40 bp, Homo sapiens
actgggataagaaagtgctgtgctgctgatgccactgaga

SEQ ID NO: 74648 - DNA, 40 bp, Homo sapiens
ctcagtggcatcagcagcacagcactttcttatcccagtg

SEQ ID NO: 74649 - DNA, 40 bp, Homo sapiens
cactgggataagaaagtgctgtgctgctgatgccactgag

SEQ ID NO: 74650 - DNA, 40 bp, Homo sapiens
tcagtggcatcagcagcacagcactttcttatcccagtga

SEQ ID NO: 74651 - DNA, 40 bp, Homo sapiens
tcactgggataagaaagtgctgtgctgctgatgccactga

SEQ ID NO: 74652 - DNA, 40 bp, Homo sapiens
cagtggcatcagcagcacagcactttcttatcccagtgag

SEQ ID NO: 74653 - DNA, 40 bp, Homo sapiens
ctcactgggataagaaagtgctgtgctgctgatgccactg

SEQ ID NO: 74654 - DNA, 40 bp, Homo sapiens
agtggcatcagcagcacagcactttcttatcccagtgaga

SEQ ID NO: 74655 - DNA, 40 bp, Homo sapiens
tctcactgggataagaaagtgctgtgctgctgatgccact

SEQ ID NO: 74656 - DNA, 40 bp, Homo sapiens
gtggcatcagcagcacagcactttcttatcccagtgagaa

SEQ ID NO: 74657 - DNA, 40 bp, Homo sapiens
ttctcactgggataagaaagtgctgtgctgctgatgccac

SEQ ID NO: 74658 - DNA, 40 bp, Homo sapiens
tggcatcagcagcacagcactttcttatcccagtgagaaa

SEQ ID NO: 74659 - DNA, 40 bp, Homo sapiens
tttctcactgggataagaaagtgctgtgctgctgatgcca

SEQ ID NO: 74660 - DNA, 40 bp, Homo sapiens
ggcatcagcagcacagcactttcttatcccagtgagaaac

SEQ ID NO: 74661 - DNA, 40 bp, Homo sapiens
gtttctcactgggataagaaagtgctgtgctgctgatgcc

SEQ ID NO: 74662 - DNA, 40 bp, Homo sapiens
gcatcagcagcacagcactttcttatcccagtgagaaacc

SEQ ID NO: 74663 - DNA, 40 bp, Homo sapiens
ggtttctcactgggataagaaagtgctgtgctgctgatgc

SEQ ID NO: 74664 - DNA, 40 bp, Homo sapiens
catcagcagcacagcactttcttatcccagtgagaaacct

SEQ ID NO: 74665 - DNA, 40 bp, Homo sapiens
aggtttctcactgggataagaaagtgctgtgctgctgatg

SEQ ID NO: 74666 - DNA, 40 bp, Homo sapiens
atcagcagcacagcactttcttatcccagtgagaaacctg

SEQ ID NO: 74667 - DNA, 40 bp, Homo sapiens
caggtttctcactgggataagaaagtgctgtgctgctgat

SEQ ID NO: 74668 - DNA, 40 bp, Homo sapiens
tcagcagcacagcactttcttatcccagtgagaaacctgg

SEQ ID NO: 74669 - DNA, 40 bp, Homo sapiens
ccaggtttctcactgggataagaaagtgctgtgctgctga

SEQ ID NO: 74670 - DNA, 40 bp, Homo sapiens
cagcagcacagcactttcttatcccagtgagaaacctggg

SEQ ID NO: 74671 - DNA, 40 bp, Homo sapiens
cccaggtttctcactgggataagaaagtgctgtgctgctg

SEQ ID NO: 74672 - DNA, 40 bp, Homo sapiens
agcagcacagcactttcttatcccagtgagaaacctggga

SEQ ID NO: 74673 - DNA, 40 bp, Homo sapiens
tcccaggtttctcactgggataagaaagtgctgtgctgct

SEQ ID NO: 74674 - DNA, 40 bp, Homo sapiens
gcagcacagcactttcttatcccagtgagaaacctgggaa

SEQ ID NO: 74675 - DNA, 40 bp, Homo sapiens
ttcccaggtttctcactgggataagaaagtgctgtgctgc

SEQ ID NO: 74676 - DNA, 40 bp, Homo sapiens
cagcacagcactttcttatcccagtgagaaacctgggaat

SEQ ID NO: 74677 - DNA, 40 bp, Homo sapiens
attcccaggtttctcactgggataagaaagtgctgtgctg

SEQ ID NO: 74678 - DNA, 40 bp, Homo sapiens
agcacagcactttcttatcccagtgagaaacctgggaatt

SEQ ID NO: 74679 - DNA, 40 bp, Homo sapiens
aattcccaggtttctcactgggataagaaagtgctgtgct

SEQ ID NO: 74680 - DNA, 40 bp, Homo sapiens
gcacagcactttcttatcccagtgagaaacctgggaattt

SEQ ID NO: 74681 - DNA, 40 bp, Homo sapiens
aaattcccaggtttctcactgggataagaaagtgctgtgc

SEQ ID NO: 74682 - DNA, 40 bp, Homo sapiens
cacagcactttcttatcccagtgagaaacctgggaatttt

SEQ ID NO: 74683 - DNA, 40 bp, Homo sapiens
aaaattcccaggtttctcactgggataagaaagtgctgtg

SEQ ID NO: 74684 - DNA, 40 bp, Homo sapiens
acagcactttcttatcccagtgagaaacctgggaatttta

SEQ ID NO: 74685 - DNA, 40 bp, Homo sapiens
taaaattcccaggtttctcactgggataagaaagtgctgt

SEQ ID NO: 74686 - DNA, 40 bp, Homo sapiens
cagcactttcttatcccagtgagaaacctgggaattttag

SEQ ID NO: 74687 - DNA, 40 bp, Homo sapiens
ctaaaattcccaggtttctcactgggataagaaagtgctg

SEQ ID NO: 74688 - DNA, 40 bp, Homo sapiens
agcactttcttatcccagtgagaaacctgggaattttagg

SEQ ID NO: 74689 - DNA, 40 bp, Homo sapiens
cctaaaattcccaggtttctcactgggataagaaagtgct

SEQ ID NO: 74690 - DNA, 40 bp, Homo sapiens
gcactttcttatcccagtgagaaacctgggaattttagga

SEQ ID NO: 74691 - DNA, 40 bp, Homo sapiens
tcctaaaattcccaggtttctcactgggataagaaagtgc

SEQ ID NO: 74692 - DNA, 40 bp, Homo sapiens
cactttcttatcccagtgagaaacctgggaattttaggat

SEQ ID NO: 74693 - DNA, 40 bp, Homo sapiens
atcctaaaattcccaggtttctcactgggataagaaagtg

SEQ ID NO: 74694 - DNA, 40 bp, Homo sapiens
actttcttatcccagtgagaaacctgggaattttaggatg

SEQ ID NO: 74695 - DNA, 40 bp, Homo sapiens
catcctaaaattcccaggtttctcactgggataagaaagt

SEQ ID NO: 74696 - DNA, 40 bp, Homo sapiens
ctttcttatcccagtgagaaacctgggaattttaggatga

SEQ ID NO: 74697 - DNA, 40 bp, Homo sapiens
tcatcctaaaattcccaggtttctcactgggataagaaag

SEQ ID NO: 74698 - DNA, 40 bp, Homo sapiens
tttcttatcccagtgagaaacctgggaattttaggatgac

SEQ ID NO: 74699 - DNA, 40 bp, Homo sapiens
gtcatcctaaaattcccaggtttctcactgggataagaaa

SEQ ID NO: 74700 - DNA, 40 bp, Homo sapiens
ttcttatcccagtgagaaacctgggaattttaggatgact

SEQ ID NO: 74701 - DNA, 40 bp, Homo sapiens
agtcatcctaaaattcccaggtttctcactgggataagaa

SEQ ID NO: 74702 - DNA, 40 bp, Homo sapiens
tcttatcccagtgagaaacctgggaattttaggatgactc

SEQ ID NO: 74703 - DNA, 40 bp, Homo sapiens
gagtcatcctaaaattcccaggtttctcactgggataaga

SEQ ID NO: 74704 - DNA, 40 bp, Homo sapiens
cttatcccagtgagaaacctgggaattttaggatgactcc

SEQ ID NO: 74705 - DNA, 40 bp, Homo sapiens
ggagtcatcctaaaattcccaggtttctcactgggataag

SEQ ID NO: 74706 - DNA, 40 bp, Homo sapiens
ttatcccagtgagaaacctgggaattttaggatgactcct

SEQ ID NO: 74707 - DNA, 40 bp, Homo sapiens
aggagtcatcctaaaattcccaggtttctcactgggataa

SEQ ID NO: 74708 - DNA, 40 bp, Homo sapiens
tatcccagtgagaaacctgggaattttaggatgactccta

SEQ ID NO: 74709 - DNA, 40 bp, Homo sapiens
taggagtcatcctaaaattcccaggtttctcactgggata

SEQ ID NO: 74710 - DNA, 40 bp, Homo sapiens
atcccagtgagaaacctgggaattttaggatgactcctac

SEQ ID NO: 74711 - DNA, 40 bp, Homo sapiens
gtaggagtcatcctaaaattcccaggtttctcactgggat

SEQ ID NO: 74712 - DNA, 40 bp, Homo sapiens
tcccagtgagaaacctgggaattttaggatgactcctacc

SEQ ID NO: 74713 - DNA, 40 bp, Homo sapiens
ggtaggagtcatcctaaaattcccaggtttctcactggga

SEQ ID NO: 74714 - DNA, 40 bp, Homo sapiens
cccagtgagaaacctgggaattttaggatgactcctaccg

SEQ ID NO: 74715 - DNA, 40 bp, Homo sapiens
cggtaggagtcatcctaaaattcccaggtttctcactggg

SEQ ID NO: 74716 - DNA, 40 bp, Homo sapiens
ccagtgagaaacctgggaattttaggatgactcctaccgc

SEQ ID NO: 74717 - DNA, 40 bp, Homo sapiens
gcggtaggagtcatcctaaaattcccaggtttctcactgg

SEQ ID NO: 74718 - DNA, 40 bp, Homo sapiens
cagtgagaaacctgggaattttaggatgactcctaccgcc

SEQ ID NO: 74719 - DNA, 40 bp, Homo sapiens
ggcggtaggagtcatcctaaaattcccaggtttctcactg

SEQ ID NO: 74720 - DNA, 40 bp, Homo sapiens
agtgagaaacctgggaattttaggatgactcctaccgccc

SEQ ID NO: 74721 - DNA, 40 bp, Homo sapiens
gggcggtaggagtcatcctaaaattcccaggtttctcact

SEQ ID NO: 74722 - DNA, 40 bp, Homo sapiens
gtgagaaacctgggaattttaggatgactcctaccgccct

SEQ ID NO: 74723 - DNA, 40 bp, Homo sapiens
agggcggtaggagtcatcctaaaattcccaggtttctcac

SEQ ID NO: 74724 - DNA, 40 bp, Homo sapiens
tgagaaacctgggaattttaggatgactcctaccgccctc

SEQ ID NO: 74725 - DNA, 40 bp, Homo sapiens
gagggcggtaggagtcatcctaaaattcccaggtttctca

SEQ ID NO: 74726 - DNA, 40 bp, Homo sapiens
gagaaacctgggaattttaggatgactcctaccgccctct

SEQ ID NO: 74727 - DNA, 40 bp, Homo sapiens
agagggcggtaggagtcatcctaaaattcccaggtttctc

SEQ ID NO: 74728 - DNA, 40 bp, Homo sapiens
agaaacctgggaattttaggatgactcctaccgccctctt

SEQ ID NO: 74729 - DNA, 40 bp, Homo sapiens
aagagggcggtaggagtcatcctaaaattcccaggtttct

SEQ ID NO: 74730 - DNA, 40 bp, Homo sapiens
gaaacctgggaattttaggatgactcctaccgccctcttt

SEQ ID NO: 74731 - DNA, 40 bp, Homo sapiens
aaagagggcggtaggagtcatcctaaaattcccaggtttc

SEQ ID NO: 74732 - DNA, 40 bp, Homo sapiens
aaacctgggaattttaggatgactcctaccgccctctttt

SEQ ID NO: 74733 - DNA, 40 bp, Homo sapiens
aaaagagggcggtaggagtcatcctaaaattcccaggttt

SEQ ID NO: 74734 - DNA, 40 bp, Homo sapiens
aacctgggaattttaggatgactcctaccgccctcttttc

SEQ ID NO: 74735 - DNA, 40 bp, Homo sapiens
gaaaagagggcggtaggagtcatcctaaaattcccaggtt

SEQ ID NO: 74736 - DNA, 40 bp, Homo sapiens
acctgggaattttaggatgactcctaccgccctcttttcc

SEQ ID NO: 74737 - DNA, 40 bp, Homo sapiens
ggaaaagagggcggtaggagtcatcctaaaattcccaggt

SEQ ID NO: 74738 - DNA, 40 bp, Homo sapiens
cctgggaattttaggatgactcctaccgccctcttttccc

SEQ ID NO: 74739 - DNA, 40 bp, Homo sapiens
gggaaaagagggcggtaggagtcatcctaaaattcccagg

SEQ ID NO: 74740 - DNA, 40 bp, Homo sapiens
ctgggaattttaggatgactcctaccgccctcttttcccc

SEQ ID NO: 74741 - DNA, 40 bp, Homo sapiens
ggggaaaagagggcggtaggagtcatcctaaaattcccag

SEQ ID NO: 74742 - DNA, 40 bp, Homo sapiens
tgggaattttaggatgactcctaccgccctcttttccccc

SEQ ID NO: 74743 - DNA, 40 bp, Homo sapiens
gggggaaaagagggcggtaggagtcatcctaaaattccca

SEQ ID NO: 74744 - DNA, 40 bp, Homo sapiens
gggaattttaggatgactcctaccgccctcttttccccct

SEQ ID NO: 74745 - DNA, 40 bp, Homo sapiens
agggggaaaagagggcggtaggagtcatcctaaaattccc

SEQ ID NO: 74746 - DNA, 40 bp, Homo sapiens
ggaattttaggatgactcctaccgccctcttttccccctg

SEQ ID NO: 74747 - DNA, 40 bp, Homo sapiens
cagggggaaaagagggcggtaggagtcatcctaaaattcc

SEQ ID NO: 74748 - DNA, 40 bp, Homo sapiens
gaattttaggatgactcctaccgccctcttttccccctgg

SEQ ID NO: 74749 - DNA, 40 bp, Homo sapiens
ccagggggaaaagagggcggtaggagtcatcctaaaattc

SEQ ID NO: 74750 - DNA, 40 bp, Homo sapiens
aattttaggatgactcctaccgccctcttttccccctggt

SEQ ID NO: 74751 - DNA, 40 bp, Homo sapiens
accagggggaaaagagggcggtaggagtcatcctaaaatt

SEQ ID NO: 74752 - DNA, 40 bp, Homo sapiens
attttaggatgactcctaccgccctcttttccccctggtt

SEQ ID NO: 74753 - DNA, 40 bp, Homo sapiens
aaccagggggaaaagagggcggtaggagtcatcctaaaat

SEQ ID NO: 74754 - DNA, 40 bp, Homo sapiens
ttttaggatgactcctaccgccctcttttccccctggttt

SEQ ID NO: 74755 - DNA, 40 bp, Homo sapiens
aaaccagggggaaaagagggcggtaggagtcatcctaaaa

SEQ ID NO: 74756 - DNA, 40 bp, Homo sapiens
tttaggatgactcctaccgccctcttttccccctggtttg

SEQ ID NO: 74757 - DNA, 40 bp, Homo sapiens
caaaccagggggaaaagagggcggtaggagtcatcctaaa

SEQ ID NO: 74758 - DNA, 40 bp, Homo sapiens
ttaggatgactcctaccgccctcttttccccctggtttgg

SEQ ID NO: 74759 - DNA, 40 bp, Homo sapiens
ccaaaccagggggaaaagagggcggtaggagtcatcctaa

SEQ ID NO: 74760 - DNA, 40 bp, Homo sapiens
taggatgactcctaccgccctcttttccccctggtttgga

SEQ ID NO: 74761 - DNA, 40 bp, Homo sapiens
tccaaaccagggggaaaagagggcggtaggagtcatccta

SEQ ID NO: 74762 - DNA, 40 bp, Homo sapiens
aggatgactcctaccgccctcttttccccctggtttggaa

SEQ ID NO: 74763 - DNA, 40 bp, Homo sapiens
ttccaaaccagggggaaaagagggcggtaggagtcatcct

SEQ ID NO: 74764 - DNA, 40 bp, Homo sapiens
ggatgactcctaccgccctcttttccccctggtttggaag

SEQ ID NO: 74765 - DNA, 40 bp, Homo sapiens
cttccaaaccagggggaaaagagggcggtaggagtcatcc

SEQ ID NO: 74766 - DNA, 40 bp, Homo sapiens
gatgactcctaccgccctcttttccccctggtttggaagt

SEQ ID NO: 74767 - DNA, 40 bp, Homo sapiens
acttccaaaccagggggaaaagagggcggtaggagtcatc

SEQ ID NO: 74768 - DNA, 40 bp, Homo sapiens
atgactcctaccgccctcttttccccctggtttggaagta

SEQ ID NO: 74769 - DNA, 40 bp, Homo sapiens
tacttccaaaccagggggaaaagagggcggtaggagtcat

SEQ ID NO: 74770 - DNA, 40 bp, Homo sapiens
tgactcctaccgccctcttttccccctggtttggaagtat

SEQ ID NO: 74771 - DNA, 40 bp, Homo sapiens
atacttccaaaccagggggaaaagagggcggtaggagtca

SEQ ID NO: 74772 - DNA, 40 bp, Homo sapiens
gactcctaccgccctcttttccccctggtttggaagtatc

SEQ ID NO: 74773 - DNA, 40 bp, Homo sapiens
gatacttccaaaccagggggaaaagagggcggtaggagtc

SEQ ID NO: 74774 - DNA, 40 bp, Homo sapiens
actcctaccgccctcttttccccctggtttggaagtatcc

SEQ ID NO: 74775 - DNA, 40 bp, Homo sapiens
ggatacttccaaaccagggggaaaagagggcggtaggagt

SEQ ID NO: 74776 - DNA, 40 bp, Homo sapiens
ctcctaccgccctcttttccccctggtttggaagtatcca

SEQ ID NO: 74777 - DNA, 40 bp, Homo sapiens
tggatacttccaaaccagggggaaaagagggcggtaggag

SEQ ID NO: 74778 - DNA, 40 bp, Homo sapiens
tcctaccgccctcttttccccctggtttggaagtatccac

SEQ ID NO: 74779 - DNA, 40 bp, Homo sapiens
gtggatacttccaaaccagggggaaaagagggcggtagga

SEQ ID NO: 74780 - DNA, 40 bp, Homo sapiens
cctaccgccctcttttccccctggtttggaagtatccaca

SEQ ID NO: 74781 - DNA, 40 bp, Homo sapiens
tgtggatacttccaaaccagggggaaaagagggcggtagg

SEQ ID NO: 74782 - DNA, 40 bp, Homo sapiens
ctaccgccctcttttccccctggtttggaagtatccacaa

SEQ ID NO: 74783 - DNA, 40 bp, Homo sapiens
ttgtggatacttccaaaccagggggaaaagagggcggtag

SEQ ID NO: 74784 - DNA, 40 bp, Homo sapiens
taccgccctcttttccccctggtttggaagtatccacaaa

SEQ ID NO: 74785 - DNA, 40 bp, Homo sapiens
tttgtggatacttccaaaccagggggaaaagagggcggta

SEQ ID NO: 74786 - DNA, 40 bp, Homo sapiens
accgccctcttttccccctggtttggaagtatccacaaat

SEQ ID NO: 74787 - DNA, 40 bp, Homo sapiens
atttgtggatacttccaaaccagggggaaaagagggcggt

SEQ ID NO: 74788 - DNA, 40 bp, Homo sapiens
ccgccctcttttccccctggtttggaagtatccacaaatt

SEQ ID NO: 74789 - DNA, 40 bp, Homo sapiens
aatttgtggatacttccaaaccagggggaaaagagggcgg

SEQ ID NO: 74790 - DNA, 40 bp, Homo sapiens
cgccctcttttccccctggtttggaagtatccacaaattc

SEQ ID NO: 74791 - DNA, 40 bp, Homo sapiens
gaatttgtggatacttccaaaccagggggaaaagagggcg

SEQ ID NO: 74792 - DNA, 40 bp, Homo sapiens
gccctcttttccccctggtttggaagtatccacaaattcc

SEQ ID NO: 74793 - DNA, 40 bp, Homo sapiens
ggaatttgtggatacttccaaaccagggggaaaagagggc

SEQ ID NO: 74794 - DNA, 40 bp, Homo sapiens
ccctcttttccccctggtttggaagtatccacaaattcct

SEQ ID NO: 74795 - DNA, 40 bp, Homo sapiens
aggaatttgtggatacttccaaaccagggggaaaagaggg

SEQ ID NO: 74796 - DNA, 40 bp, Homo sapiens
cctcttttccccctggtttggaagtatccacaaattcctg

SEQ ID NO: 74797 - DNA, 40 bp, Homo sapiens
caggaatttgtggatacttccaaaccagggggaaaagagg

SEQ ID NO: 74798 - DNA, 40 bp, Homo sapiens
ctcttttccccctggtttggaagtatccacaaattcctgt

SEQ ID NO: 74799 - DNA, 40 bp, Homo sapiens
acaggaatttgtggatacttccaaaccagggggaaaagag

SEQ ID NO: 74800 - DNA, 40 bp, Homo sapiens
tcttttccccctggtttggaagtatccacaaattcctgtg

SEQ ID NO: 74801 - DNA, 40 bp, Homo sapiens
cacaggaatttgtggatacttccaaaccagggggaaaaga

SEQ ID NO: 74802 - DNA, 40 bp, Homo sapiens
cttttccccctggtttggaagtatccacaaattcctgtga

SEQ ID NO: 74803 - DNA, 40 bp, Homo sapiens
tcacaggaatttgtggatacttccaaaccagggggaaaag

SEQ ID NO: 74804 - DNA, 40 bp, Homo sapiens
ttttccccctggtttggaagtatccacaaattcctgtgac

SEQ ID NO: 74805 - DNA, 40 bp, Homo sapiens
gtcacaggaatttgtggatacttccaaaccagggggaaaa

SEQ ID NO: 74806 - DNA, 40 bp, Homo sapiens
tttccccctggtttggaagtatccacaaattcctgtgacg

SEQ ID NO: 74807 - DNA, 40 bp, Homo sapiens
cgtcacaggaatttgtggatacttccaaaccagggggaaa

SEQ ID NO: 74808 - DNA, 40 bp, Homo sapiens
ttccccctggtttggaagtatccacaaattcctgtgacgt

SEQ ID NO: 74809 - DNA, 40 bp, Homo sapiens
acgtcacaggaatttgtggatacttccaaaccagggggaa

SEQ ID NO: 74810 - DNA, 40 bp, Homo sapiens
tccccctggtttggaagtatccacaaattcctgtgacgtt

SEQ ID NO: 74811 - DNA, 40 bp, Homo sapiens
aacgtcacaggaatttgtggatacttccaaaccaggggga

SEQ ID NO: 74812 - DNA, 40 bp, Homo sapiens
ccccctggtttggaagtatccacaaattcctgtgacgtta

SEQ ID NO: 74813 - DNA, 40 bp, Homo sapiens
taacgtcacaggaatttgtggatacttccaaaccaggggg

SEQ ID NO: 74814 - DNA, 40 bp, Homo sapiens
cccctggtttggaagtatccacaaattcctgtgacgttac

SEQ ID NO: 74815 - DNA, 40 bp, Homo sapiens
gtaacgtcacaggaatttgtggatacttccaaaccagggg

SEQ ID NO: 74816 - DNA, 40 bp, Homo sapiens
ccctggtttggaagtatccacaaattcctgtgacgttaca

SEQ ID NO: 74817 - DNA, 40 bp, Homo sapiens
tgtaacgtcacaggaatttgtggatacttccaaaccaggg

SEQ ID NO: 74818 - DNA, 40 bp, Homo sapiens
cctggtttggaagtatccacaaattcctgtgacgttacat

SEQ ID NO: 74819 - DNA, 40 bp, Homo sapiens
atgtaacgtcacaggaatttgtggatacttccaaaccagg

SEQ ID NO: 74820 - DNA, 40 bp, Homo sapiens
ctggtttggaagtatccacaaattcctgtgacgttacatt

SEQ ID NO: 74821 - DNA, 40 bp, Homo sapiens
aatgtaacgtcacaggaatttgtggatacttccaaaccag

SEQ ID NO: 74822 - DNA, 40 bp, Homo sapiens
tggtttggaagtatccacaaattcctgtgacgttacattc

SEQ ID NO: 74823 - DNA, 40 bp, Homo sapiens
gaatgtaacgtcacaggaatttgtggatacttccaaacca

SEQ ID NO: 74824 - DNA, 40 bp, Homo sapiens
ggtttggaagtatccacaaattcctgtgacgttacattct

SEQ ID NO: 74825 - DNA, 40 bp, Homo sapiens
agaatgtaacgtcacaggaatttgtggatacttccaaacc

SEQ ID NO: 74826 - DNA, 40 bp, Homo sapiens
gtttggaagtatccacaaattcctgtgacgttacattctg

SEQ ID NO: 74827 - DNA, 40 bp, Homo sapiens
cagaatgtaacgtcacaggaatttgtggatacttccaaac

SEQ ID NO: 74828 - DNA, 40 bp, Homo sapiens
tttggaagtatccacaaattcctgtgacgttacattctgt

SEQ ID NO: 74829 - DNA, 40 bp, Homo sapiens
acagaatgtaacgtcacaggaatttgtggatacttccaaa

SEQ ID NO: 74830 - DNA, 40 bp, Homo sapiens
ttggaagtatccacaaattcctgtgacgttacattctgtg

SEQ ID NO: 74831 - DNA, 40 bp, Homo sapiens
cacagaatgtaacgtcacaggaatttgtggatacttccaa

SEQ ID NO: 74832 - DNA, 40 bp, Homo sapiens
tggaagtatccacaaattcctgtgacgttacattctgtgt

SEQ ID NO: 74833 - DNA, 40 bp, Homo sapiens
acacagaatgtaacgtcacaggaatttgtggatacttcca

SEQ ID NO: 74834 - DNA, 40 bp, Homo sapiens
ggaagtatccacaaattcctgtgacgttacattctgtgtc

SEQ ID NO: 74835 - DNA, 40 bp, Homo sapiens
gacacagaatgtaacgtcacaggaatttgtggatacttcc

SEQ ID NO: 74836 - DNA, 40 bp, Homo sapiens
gaagtatccacaaattcctgtgacgttacattctgtgtct

SEQ ID NO: 74837 - DNA, 40 bp, Homo sapiens
agacacagaatgtaacgtcacaggaatttgtggatacttc

SEQ ID NO: 74838 - DNA, 40 bp, Homo sapiens
aagtatccacaaattcctgtgacgttacattctgtgtctt

SEQ ID NO: 74839 - DNA, 40 bp, Homo sapiens
aagacacagaatgtaacgtcacaggaatttgtggatactt

SEQ ID NO: 74840 - DNA, 40 bp, Homo sapiens
agtatccacaaattcctgtgacgttacattctgtgtcttt

SEQ ID NO: 74841 - DNA, 40 bp, Homo sapiens
aaagacacagaatgtaacgtcacaggaatttgtggatact

SEQ ID NO: 74842 - DNA, 40 bp, Homo sapiens
gtatccacaaattcctgtgacgttacattctgtgtctttt

SEQ ID NO: 74843 - DNA, 40 bp, Homo sapiens
aaaagacacagaatgtaacgtcacaggaatttgtggatac

SEQ ID NO: 74844 - DNA, 40 bp, Homo sapiens
tatccacaaattcctgtgacgttacattctgtgtctttta

SEQ ID NO: 74845 - DNA, 40 bp, Homo sapiens
taaaagacacagaatgtaacgtcacaggaatttgtggata

SEQ ID NO: 74846 - DNA, 40 bp, Homo sapiens
atccacaaattcctgtgacgttacattctgtgtcttttat

SEQ ID NO: 74847 - DNA, 40 bp, Homo sapiens
ataaaagacacagaatgtaacgtcacaggaatttgtggat

SEQ ID NO: 74848 - DNA, 40 bp, Homo sapiens
tccacaaattcctgtgacgttacattctgtgtcttttatg

SEQ ID NO: 74849 - DNA, 40 bp, Homo sapiens
cataaaagacacagaatgtaacgtcacaggaatttgtgga

SEQ ID NO: 74850 - DNA, 40 bp, Homo sapiens
ccacaaattcctgtgacgttacattctgtgtcttttatgt

SEQ ID NO: 74851 - DNA, 40 bp, Homo sapiens
acataaaagacacagaatgtaacgtcacaggaatttgtgg

SEQ ID NO: 74852 - DNA, 40 bp, Homo sapiens
cacaaattcctgtgacgttacattctgtgtcttttatgtc

SEQ ID NO: 74853 - DNA, 40 bp, Homo sapiens
gacataaaagacacagaatgtaacgtcacaggaatttgtg

SEQ ID NO: 74854 - DNA, 40 bp, Homo sapiens
acaaattcctgtgacgttacattctgtgtcttttatgtca

SEQ ID NO: 74855 - DNA, 40 bp, Homo sapiens
tgacataaaagacacagaatgtaacgtcacaggaatttgt

SEQ ID NO: 74856 - DNA, 40 bp, Homo sapiens
caaattcctgtgacgttacattctgtgtcttttatgtcat

SEQ ID NO: 74857 - DNA, 40 bp, Homo sapiens
atgacataaaagacacagaatgtaacgtcacaggaatttg

SEQ ID NO: 74858 - DNA, 40 bp, Homo sapiens
aaattcctgtgacgttacattctgtgtcttttatgtcatc

SEQ ID NO: 74859 - DNA, 40 bp, Homo sapiens
gatgacataaaagacacagaatgtaacgtcacaggaattt

SEQ ID NO: 74860 - DNA, 40 bp, Homo sapiens
aattcctgtgacgttacattctgtgtcttttatgtcatca

SEQ ID NO: 74861 - DNA, 40 bp, Homo sapiens
tgatgacataaaagacacagaatgtaacgtcacaggaatt

SEQ ID NO: 74862 - DNA, 40 bp, Homo sapiens
attcctgtgacgttacattctgtgtcttttatgtcatcat

SEQ ID NO: 74863 - DNA, 40 bp, Homo sapiens
atgatgacataaaagacacagaatgtaacgtcacaggaat

SEQ ID NO: 74864 - DNA, 40 bp, Homo sapiens
ttcctgtgacgttacattctgtgtcttttatgtcatcatt

SEQ ID NO: 74865 - DNA, 40 bp, Homo sapiens
aatgatgacataaaagacacagaatgtaacgtcacaggaa

SEQ ID NO: 74866 - DNA, 40 bp, Homo sapiens
tcctgtgacgttacattctgtgtcttttatgtcatcatta

SEQ ID NO: 74867 - DNA, 40 bp, Homo sapiens
taatgatgacataaaagacacagaatgtaacgtcacagga

SEQ ID NO: 74868 - DNA, 40 bp, Homo sapiens
cctgtgacgttacattctgtgtcttttatgtcatcattag

SEQ ID NO: 74869 - DNA, 40 bp, Homo sapiens
ctaatgatgacataaaagacacagaatgtaacgtcacagg

SEQ ID NO: 74870 - DNA, 40 bp, Homo sapiens
ctgtgacgttacattctgtgtcttttatgtcatcattagt

SEQ ID NO: 74871 - DNA, 40 bp, Homo sapiens
actaatgatgacataaaagacacagaatgtaacgtcacag

SEQ ID NO: 74872 - DNA, 40 bp, Homo sapiens
tgtgacgttacattctgtgtcttttatgtcatcattagtt

SEQ ID NO: 74873 - DNA, 40 bp, Homo sapiens
aactaatgatgacataaaagacacagaatgtaacgtcaca

SEQ ID NO: 74874 - DNA, 40 bp, Homo sapiens
gtgacgttacattctgtgtcttttatgtcatcattagttc

SEQ ID NO: 74875 - DNA, 40 bp, Homo sapiens
gaactaatgatgacataaaagacacagaatgtaacgtcac

SEQ ID NO: 74876 - DNA, 40 bp, Homo sapiens
tgacgttacattctgtgtcttttatgtcatcattagttca

SEQ ID NO: 74877 - DNA, 40 bp, Homo sapiens
tgaactaatgatgacataaaagacacagaatgtaacgtca

SEQ ID NO: 74878 - DNA, 40 bp, Homo sapiens
gacgttacattctgtgtcttttatgtcatcattagttcag

SEQ ID NO: 74879 - DNA, 40 bp, Homo sapiens
ctgaactaatgatgacataaaagacacagaatgtaacgtc

SEQ ID NO: 74880 - DNA, 40 bp, Homo sapiens
acgttacattctgtgtcttttatgtcatcattagttcagg

SEQ ID NO: 74881 - DNA, 40 bp, Homo sapiens
cctgaactaatgatgacataaaagacacagaatgtaacgt

SEQ ID NO: 74882 - DNA, 40 bp, Homo sapiens
cgttacattctgtgtcttttatgtcatcattagttcaggc

SEQ ID NO: 74883 - DNA, 40 bp, Homo sapiens
gcctgaactaatgatgacataaaagacacagaatgtaacg

SEQ ID NO: 74884 - DNA, 40 bp, Homo sapiens
gttacattctgtgtcttttatgtcatcattagttcaggcc

SEQ ID NO: 74885 - DNA, 40 bp, Homo sapiens
ggcctgaactaatgatgacataaaagacacagaatgtaac

SEQ ID NO: 74886 - DNA, 40 bp, Homo sapiens
ttacattctgtgtcttttatgtcatcattagttcaggccc

SEQ ID NO: 74887 - DNA, 40 bp, Homo sapiens
gggcctgaactaatgatgacataaaagacacagaatgtaa

SEQ ID NO: 74888 - DNA, 40 bp, Homo sapiens
tacattctgtgtcttttatgtcatcattagttcaggcccc

SEQ ID NO: 74889 - DNA, 40 bp, Homo sapiens
ggggcctgaactaatgatgacataaaagacacagaatgta

SEQ ID NO: 74890 - DNA, 40 bp, Homo sapiens
acattctgtgtcttttatgtcatcattagttcaggcccct

SEQ ID NO: 74891 - DNA, 40 bp, Homo sapiens
aggggcctgaactaatgatgacataaaagacacagaatgt

SEQ ID NO: 74892 - DNA, 40 bp, Homo sapiens
cattctgtgtcttttatgtcatcattagttcaggccccta

SEQ ID NO: 74893 - DNA, 40 bp, Homo sapiens
taggggcctgaactaatgatgacataaaagacacagaatg

SEQ ID NO: 74894 - DNA, 40 bp, Homo sapiens
attctgtgtcttttatgtcatcattagttcaggcccctat

SEQ ID NO: 74895 - DNA, 40 bp, Homo sapiens
ataggggcctgaactaatgatgacataaaagacacagaat

SEQ ID NO: 74896 - DNA, 40 bp, Homo sapiens
ttctgtgtcttttatgtcatcattagttcaggcccctatc

SEQ ID NO: 74897 - DNA, 40 bp, Homo sapiens
gataggggcctgaactaatgatgacataaaagacacagaa

SEQ ID NO: 74898 - DNA, 40 bp, Homo sapiens
tctgtgtcttttatgtcatcattagttcaggcccctatca

SEQ ID NO: 74899 - DNA, 40 bp, Homo sapiens
tgataggggcctgaactaatgatgacataaaagacacaga

SEQ ID NO: 74900 - DNA, 40 bp, Homo sapiens
ctgtgtcttttatgtcatcattagttcaggcccctatcat

SEQ ID NO: 74901 - DNA, 40 bp, Homo sapiens
atgataggggcctgaactaatgatgacataaaagacacag

SEQ ID NO: 74902 - DNA, 40 bp, Homo sapiens
tgtgtcttttatgtcatcattagttcaggcccctatcatt

SEQ ID NO: 74903 - DNA, 40 bp, Homo sapiens
aatgataggggcctgaactaatgatgacataaaagacaca

SEQ ID NO: 74904 - DNA, 40 bp, Homo sapiens
gtgtcttttatgtcatcattagttcaggcccctatcattt

SEQ ID NO: 74905 - DNA, 40 bp, Homo sapiens
aaatgataggggcctgaactaatgatgacataaaagacac

SEQ ID NO: 74906 - DNA, 40 bp, Homo sapiens
tgtcttttatgtcatcattagttcaggcccctatcatttc

SEQ ID NO: 74907 - DNA, 40 bp, Homo sapiens
gaaatgataggggcctgaactaatgatgacataaaagaca

SEQ ID NO: 74908 - DNA, 40 bp, Homo sapiens
gtcttttatgtcatcattagttcaggcccctatcatttct

SEQ ID NO: 74909 - DNA, 40 bp, Homo sapiens
agaaatgataggggcctgaactaatgatgacataaaagac

SEQ ID NO: 74910 - DNA, 40 bp, Homo sapiens
tcttttatgtcatcattagttcaggcccctatcatttctt

SEQ ID NO: 74911 - DNA, 40 bp, Homo sapiens
aagaaatgataggggcctgaactaatgatgacataaaaga

SEQ ID NO: 74912 - DNA, 40 bp, Homo sapiens
cttttatgtcatcattagttcaggcccctatcatttcttg

SEQ ID NO: 74913 - DNA, 40 bp, Homo sapiens
caagaaatgataggggcctgaactaatgatgacataaaag

SEQ ID NO: 74914 - DNA, 40 bp, Homo sapiens
ttttatgtcatcattagttcaggcccctatcatttcttgt

SEQ ID NO: 74915 - DNA, 40 bp, Homo sapiens
acaagaaatgataggggcctgaactaatgatgacataaaa

SEQ ID NO: 74916 - DNA, 40 bp, Homo sapiens
tttatgtcatcattagttcaggcccctatcatttcttgtt

SEQ ID NO: 74917 - DNA, 40 bp, Homo sapiens
aacaagaaatgataggggcctgaactaatgatgacataaa

SEQ ID NO: 74918 - DNA, 40 bp, Homo sapiens
ttatgtcatcattagttcaggcccctatcatttcttgttg

SEQ ID NO: 74919 - DNA, 40 bp, Homo sapiens
caacaagaaatgataggggcctgaactaatgatgacataa

SEQ ID NO: 74920 - DNA, 40 bp, Homo sapiens
tatgtcatcattagttcaggcccctatcatttcttgttgg

SEQ ID NO: 74921 - DNA, 40 bp, Homo sapiens
ccaacaagaaatgataggggcctgaactaatgatgacata

SEQ ID NO: 74922 - DNA, 40 bp, Homo sapiens
atgtcatcattagttcaggcccctatcatttcttgttgga

SEQ ID NO: 74923 - DNA, 40 bp, Homo sapiens
tccaacaagaaatgataggggcctgaactaatgatgacat

SEQ ID NO: 74924 - DNA, 40 bp, Homo sapiens
tgtcatcattagttcaggcccctatcatttcttgttggac

SEQ ID NO: 74925 - DNA, 40 bp, Homo sapiens
gtccaacaagaaatgataggggcctgaactaatgatgaca

SEQ ID NO: 74926 - DNA, 40 bp, Homo sapiens
gtcatcattagttcaggcccctatcatttcttgttggact

SEQ ID NO: 74927 - DNA, 40 bp, Homo sapiens
agtccaacaagaaatgataggggcctgaactaatgatgac

SEQ ID NO: 74928 - DNA, 40 bp, Homo sapiens
tcatcattagttcaggcccctatcatttcttgttggactg

SEQ ID NO: 74929 - DNA, 40 bp, Homo sapiens
cagtccaacaagaaatgataggggcctgaactaatgatga

SEQ ID NO: 74930 - DNA, 40 bp, Homo sapiens
catcattagttcaggcccctatcatttcttgttggactgt

SEQ ID NO: 74931 - DNA, 40 bp, Homo sapiens
acagtccaacaagaaatgataggggcctgaactaatgatg

SEQ ID NO: 74932 - DNA, 40 bp, Homo sapiens
atcattagttcaggcccctatcatttcttgttggactgtt

SEQ ID NO: 74933 - DNA, 40 bp, Homo sapiens
aacagtccaacaagaaatgataggggcctgaactaatgat

SEQ ID NO: 74934 - DNA, 40 bp, Homo sapiens
tcattagttcaggcccctatcatttcttgttggactgtta

SEQ ID NO: 74935 - DNA, 40 bp, Homo sapiens
taacagtccaacaagaaatgataggggcctgaactaatga

SEQ ID NO: 74936 - DNA, 40 bp, Homo sapiens
cattagttcaggcccctatcatttcttgttggactgttag

SEQ ID NO: 74937 - DNA, 40 bp, Homo sapiens
ctaacagtccaacaagaaatgataggggcctgaactaatg

SEQ ID NO: 74938 - DNA, 40 bp, Homo sapiens
attagttcaggcccctatcatttcttgttggactgttaga

SEQ ID NO: 74939 - DNA, 40 bp, Homo sapiens
tctaacagtccaacaagaaatgataggggcctgaactaat

SEQ ID NO: 74940 - DNA, 40 bp, Homo sapiens
ttagttcaggcccctatcatttcttgttggactgttagaa

SEQ ID NO: 74941 - DNA, 40 bp, Homo sapiens
ttctaacagtccaacaagaaatgataggggcctgaactaa

SEQ ID NO: 74942 - DNA, 40 bp, Homo sapiens
tagttcaggcccctatcatttcttgttggactgttagaac

SEQ ID NO: 74943 - DNA, 40 bp, Homo sapiens
gttctaacagtccaacaagaaatgataggggcctgaacta

SEQ ID NO: 74944 - DNA, 40 bp, Homo sapiens
agttcaggcccctatcatttcttgttggactgttagaacc

SEQ ID NO: 74945 - DNA, 40 bp, Homo sapiens
ggttctaacagtccaacaagaaatgataggggcctgaact

SEQ ID NO: 74946 - DNA, 40 bp, Homo sapiens
gttcaggcccctatcatttcttgttggactgttagaacct

SEQ ID NO: 74947 - DNA, 40 bp, Homo sapiens
aggttctaacagtccaacaagaaatgataggggcctgaac

SEQ ID NO: 74948 - DNA, 40 bp, Homo sapiens
ttcaggcccctatcatttcttgttggactgttagaacctc

SEQ ID NO: 74949 - DNA, 40 bp, Homo sapiens
gaggttctaacagtccaacaagaaatgataggggcctgaa

SEQ ID NO: 74950 - DNA, 40 bp, Homo sapiens
tcaggcccctatcatttcttgttggactgttagaacctcc

SEQ ID NO: 74951 - DNA, 40 bp, Homo sapiens
ggaggttctaacagtccaacaagaaatgataggggcctga

SEQ ID NO: 74952 - DNA, 40 bp, Homo sapiens
caggcccctatcatttcttgttggactgttagaacctcct

SEQ ID NO: 74953 - DNA, 40 bp, Homo sapiens
aggaggttctaacagtccaacaagaaatgataggggcctg

SEQ ID NO: 74954 - DNA, 40 bp, Homo sapiens
aggcccctatcatttcttgttggactgttagaacctccta

SEQ ID NO: 74955 - DNA, 40 bp, Homo sapiens
taggaggttctaacagtccaacaagaaatgataggggcct

SEQ ID NO: 74956 - DNA, 40 bp, Homo sapiens
ggcccctatcatttcttgttggactgttagaacctcctat

SEQ ID NO: 74957 - DNA, 40 bp, Homo sapiens
ataggaggttctaacagtccaacaagaaatgataggggcc

SEQ ID NO: 74958 - DNA, 40 bp, Homo sapiens
gcccctatcatttcttgttggactgttagaacctcctatt

SEQ ID NO: 74959 - DNA, 40 bp, Homo sapiens
aataggaggttctaacagtccaacaagaaatgataggggc

SEQ ID NO: 74960 - DNA, 40 bp, Homo sapiens
cccctatcatttcttgttggactgttagaacctcctattt

SEQ ID NO: 74961 - DNA, 40 bp, Homo sapiens
aaataggaggttctaacagtccaacaagaaatgatagggg

SEQ ID NO: 74962 - DNA, 40 bp, Homo sapiens
ccctatcatttcttgttggactgttagaacctcctatttg

SEQ ID NO: 74963 - DNA, 40 bp, Homo sapiens
caaataggaggttctaacagtccaacaagaaatgataggg

SEQ ID NO: 74964 - DNA, 40 bp, Homo sapiens
cctatcatttcttgttggactgttagaacctcctatttgg

SEQ ID NO: 74965 - DNA, 40 bp, Homo sapiens
ccaaataggaggttctaacagtccaacaagaaatgatagg

SEQ ID NO: 74966 - DNA, 40 bp, Homo sapiens
ctatcatttcttgttggactgttagaacctcctatttggt

SEQ ID NO: 74967 - DNA, 40 bp, Homo sapiens
accaaataggaggttctaacagtccaacaagaaatgatag

SEQ ID NO: 74968 - DNA, 40 bp, Homo sapiens
tatcatttcttgttggactgttagaacctcctatttggtt

SEQ ID NO: 74969 - DNA, 40 bp, Homo sapiens
aaccaaataggaggttctaacagtccaacaagaaatgata

SEQ ID NO: 74970 - DNA, 40 bp, Homo sapiens
atcatttcttgttggactgttagaacctcctatttggttt

SEQ ID NO: 74971 - DNA, 40 bp, Homo sapiens
aaaccaaataggaggttctaacagtccaacaagaaatgat

SEQ ID NO: 74972 - DNA, 40 bp, Homo sapiens
tcatttcttgttggactgttagaacctcctatttggttta

SEQ ID NO: 74973 - DNA, 40 bp, Homo sapiens
taaaccaaataggaggttctaacagtccaacaagaaatga

SEQ ID NO: 74974 - DNA, 40 bp, Homo sapiens
catttcttgttggactgttagaacctcctatttggtttac

SEQ ID NO: 74975 - DNA, 40 bp, Homo sapiens
gtaaaccaaataggaggttctaacagtccaacaagaaatg

SEQ ID NO: 74976 - DNA, 40 bp, Homo sapiens
atttcttgttggactgttagaacctcctatttggtttacc

SEQ ID NO: 74977 - DNA, 40 bp, Homo sapiens
ggtaaaccaaataggaggttctaacagtccaacaagaaat

SEQ ID NO: 74978 - DNA, 40 bp, Homo sapiens
tttcttgttggactgttagaacctcctatttggtttacca

SEQ ID NO: 74979 - DNA, 40 bp, Homo sapiens
tggtaaaccaaataggaggttctaacagtccaacaagaaa

SEQ ID NO: 74980 - DNA, 40 bp, Homo sapiens
ttcttgttggactgttagaacctcctatttggtttaccag

SEQ ID NO: 74981 - DNA, 40 bp, Homo sapiens
ctggtaaaccaaataggaggttctaacagtccaacaagaa

SEQ ID NO: 74982 - DNA, 40 bp, Homo sapiens
tcttgttggactgttagaacctcctatttggtttaccagt

SEQ ID NO: 74983 - DNA, 40 bp, Homo sapiens
actggtaaaccaaataggaggttctaacagtccaacaaga

SEQ ID NO: 74984 - DNA, 40 bp, Homo sapiens
cttgttggactgttagaacctcctatttggtttaccagtt

SEQ ID NO: 74985 - DNA, 40 bp, Homo sapiens
aactggtaaaccaaataggaggttctaacagtccaacaag

SEQ ID NO: 74986 - DNA, 40 bp, Homo sapiens
ttgttggactgttagaacctcctatttggtttaccagttg

SEQ ID NO: 74987 - DNA, 40 bp, Homo sapiens
caactggtaaaccaaataggaggttctaacagtccaacaa

SEQ ID NO: 74988 - DNA, 40 bp, Homo sapiens
tgttggactgttagaacctcctatttggtttaccagttgc

SEQ ID NO: 74989 - DNA, 40 bp, Homo sapiens
gcaactggtaaaccaaataggaggttctaacagtccaaca

SEQ ID NO: 74990 - DNA, 40 bp, Homo sapiens
gttggactgttagaacctcctatttggtttaccagttgct

SEQ ID NO: 74991 - DNA, 40 bp, Homo sapiens
agcaactggtaaaccaaataggaggttctaacagtccaac

SEQ ID NO: 74992 - DNA, 40 bp, Homo sapiens
ttggactgttagaacctcctatttggtttaccagttgctg

SEQ ID NO: 74993 - DNA, 40 bp, Homo sapiens
cagcaactggtaaaccaaataggaggttctaacagtccaa

SEQ ID NO: 74994 - DNA, 40 bp, Homo sapiens
tggactgttagaacctcctatttggtttaccagttgctgc

SEQ ID NO: 74995 - DNA, 40 bp, Homo sapiens
gcagcaactggtaaaccaaataggaggttctaacagtcca

SEQ ID NO: 74996 - DNA, 40 bp, Homo sapiens
ggactgttagaacctcctatttggtttaccagttgctgcc

SEQ ID NO: 74997 - DNA, 40 bp, Homo sapiens
ggcagcaactggtaaaccaaataggaggttctaacagtcc

SEQ ID NO: 74998 - DNA, 40 bp, Homo sapiens
gactgttagaacctcctatttggtttaccagttgctgcca

SEQ ID NO: 74999 - DNA, 40 bp, Homo sapiens
tggcagcaactggtaaaccaaataggaggttctaacagtc

SEQ ID NO: 75000 - DNA, 40 bp, Homo sapiens
actgttagaacctcctatttggtttaccagttgctgccat

SEQ ID NO: 75001 - DNA, 40 bp, Homo sapiens
atggcagcaactggtaaaccaaataggaggttctaacagt

SEQ ID NO: 75002 - DNA, 40 bp, Homo sapiens
ctgttagaacctcctatttggtttaccagttgctgccatc

SEQ ID NO: 75003 - DNA, 40 bp, Homo sapiens
gatggcagcaactggtaaaccaaataggaggttctaacag

SEQ ID NO: 75004 - DNA, 40 bp, Homo sapiens
tgttagaacctcctatttggtttaccagttgctgccatca

SEQ ID NO: 75005 - DNA, 40 bp, Homo sapiens
tgatggcagcaactggtaaaccaaataggaggttctaaca

SEQ ID NO: 75006 - DNA, 40 bp, Homo sapiens
gttagaacctcctatttggtttaccagttgctgccatcat

SEQ ID NO: 75007 - DNA, 40 bp, Homo sapiens
atgatggcagcaactggtaaaccaaataggaggttctaac

SEQ ID NO: 75008 - DNA, 40 bp, Homo sapiens
ttagaacctcctatttggtttaccagttgctgccatcatt

SEQ ID NO: 75009 - DNA, 40 bp, Homo sapiens
aatgatggcagcaactggtaaaccaaataggaggttctaa

SEQ ID NO: 75010 - DNA, 40 bp, Homo sapiens
tagaacctcctatttggtttaccagttgctgccatcattc

SEQ ID NO: 75011 - DNA, 40 bp, Homo sapiens
gaatgatggcagcaactggtaaaccaaataggaggttcta

SEQ ID NO: 75012 - DNA, 40 bp, Homo sapiens
agaacctcctatttggtttaccagttgctgccatcattca

SEQ ID NO: 75013 - DNA, 40 bp, Homo sapiens
tgaatgatggcagcaactggtaaaccaaataggaggttct

SEQ ID NO: 75014 - DNA, 40 bp, Homo sapiens
gaacctcctatttggtttaccagttgctgccatcattcat

SEQ ID NO: 75015 - DNA, 40 bp, Homo sapiens
atgaatgatggcagcaactggtaaaccaaataggaggttc

SEQ ID NO: 75016 - DNA, 40 bp, Homo sapiens
aacctcctatttggtttaccagttgctgccatcattcatt

SEQ ID NO: 75017 - DNA, 40 bp, Homo sapiens
aatgaatgatggcagcaactggtaaaccaaataggaggtt

SEQ ID NO: 75018 - DNA, 40 bp, Homo sapiens
acctcctatttggtttaccagttgctgccatcattcattg

SEQ ID NO: 75019 - DNA, 40 bp, Homo sapiens
caatgaatgatggcagcaactggtaaaccaaataggaggt

SEQ ID NO: 75020 - DNA, 40 bp, Homo sapiens
cctcctatttggtttaccagttgctgccatcattcattgt

SEQ ID NO: 75021 - DNA, 40 bp, Homo sapiens
acaatgaatgatggcagcaactggtaaaccaaataggagg

SEQ ID NO: 75022 - DNA, 40 bp, Homo sapiens
ctcctatttggtttaccagttgctgccatcattcattgtg

SEQ ID NO: 75023 - DNA, 40 bp, Homo sapiens
cacaatgaatgatggcagcaactggtaaaccaaataggag

SEQ ID NO: 75024 - DNA, 40 bp, Homo sapiens
tcctatttggtttaccagttgctgccatcattcattgtga

SEQ ID NO: 75025 - DNA, 40 bp, Homo sapiens
tcacaatgaatgatggcagcaactggtaaaccaaatagga

SEQ ID NO: 75026 - DNA, 40 bp, Homo sapiens
cctatttggtttaccagttgctgccatcattcattgtgaa

SEQ ID NO: 75027 - DNA, 40 bp, Homo sapiens
ttcacaatgaatgatggcagcaactggtaaaccaaatagg

SEQ ID NO: 75028 - DNA, 40 bp, Homo sapiens
ctatttggtttaccagttgctgccatcattcattgtgaaa

SEQ ID NO: 75029 - DNA, 40 bp, Homo sapiens
tttcacaatgaatgatggcagcaactggtaaaccaaatag

SEQ ID NO: 75030 - DNA, 40 bp, Homo sapiens
tatttggtttaccagttgctgccatcattcattgtgaaac

SEQ ID NO: 75031 - DNA, 40 bp, Homo sapiens
gtttcacaatgaatgatggcagcaactggtaaaccaaata

SEQ ID NO: 75032 - DNA, 40 bp, Homo sapiens
atttggtttaccagttgctgccatcattcattgtgaaacc

SEQ ID NO: 75033 - DNA, 40 bp, Homo sapiens
ggtttcacaatgaatgatggcagcaactggtaaaccaaat

SEQ ID NO: 75034 - DNA, 40 bp, Homo sapiens
tttggtttaccagttgctgccatcattcattgtgaaaccg

SEQ ID NO: 75035 - DNA, 40 bp, Homo sapiens
cggtttcacaatgaatgatggcagcaactggtaaaccaaa

SEQ ID NO: 75036 - DNA, 40 bp, Homo sapiens
ttggtttaccagttgctgccatcattcattgtgaaaccgg

SEQ ID NO: 75037 - DNA, 40 bp, Homo sapiens
ccggtttcacaatgaatgatggcagcaactggtaaaccaa

SEQ ID NO: 75038 - DNA, 40 bp, Homo sapiens
tggtttaccagttgctgccatcattcattgtgaaaccgga

SEQ ID NO: 75039 - DNA, 40 bp, Homo sapiens
tccggtttcacaatgaatgatggcagcaactggtaaacca

SEQ ID NO: 75040 - DNA, 40 bp, Homo sapiens
ggtttaccagttgctgccatcattcattgtgaaaccggag

SEQ ID NO: 75041 - DNA, 40 bp, Homo sapiens
ctccggtttcacaatgaatgatggcagcaactggtaaacc

SEQ ID NO: 75042 - DNA, 40 bp, Homo sapiens
gtttaccagttgctgccatcattcattgtgaaaccggaga

SEQ ID NO: 75043 - DNA, 40 bp, Homo sapiens
tctccggtttcacaatgaatgatggcagcaactggtaaac

SEQ ID NO: 75044 - DNA, 40 bp, Homo sapiens
tttaccagttgctgccatcattcattgtgaaaccggagag

SEQ ID NO: 75045 - DNA, 40 bp, Homo sapiens
ctctccggtttcacaatgaatgatggcagcaactggtaaa

SEQ ID NO: 75046 - DNA, 40 bp, Homo sapiens
ttaccagttgctgccatcattcattgtgaaaccggagaga

SEQ ID NO: 75047 - DNA, 40 bp, Homo sapiens
tctctccggtttcacaatgaatgatggcagcaactggtaa

SEQ ID NO: 75048 - DNA, 40 bp, Homo sapiens
taccagttgctgccatcattcattgtgaaaccggagagat

SEQ ID NO: 75049 - DNA, 40 bp, Homo sapiens
atctctccggtttcacaatgaatgatggcagcaactggta

SEQ ID NO: 75050 - DNA, 40 bp, Homo sapiens
accagttgctgccatcattcattgtgaaaccggagagata

SEQ ID NO: 75051 - DNA, 40 bp, Homo sapiens
tatctctccggtttcacaatgaatgatggcagcaactggt

SEQ ID NO: 75052 - DNA, 40 bp, Homo sapiens
ccagttgctgccatcattcattgtgaaaccggagagatac

SEQ ID NO: 75053 - DNA, 40 bp, Homo sapiens
gtatctctccggtttcacaatgaatgatggcagcaactgg

SEQ ID NO: 75054 - DNA, 40 bp, Homo sapiens
cagttgctgccatcattcattgtgaaaccggagagataca

SEQ ID NO: 75055 - DNA, 40 bp, Homo sapiens
tgtatctctccggtttcacaatgaatgatggcagcaactg

SEQ ID NO: 75056 - DNA, 40 bp, Homo sapiens
agttgctgccatcattcattgtgaaaccggagagatacac

SEQ ID NO: 75057 - DNA, 40 bp, Homo sapiens
gtgtatctctccggtttcacaatgaatgatggcagcaact

SEQ ID NO: 75058 - DNA, 40 bp, Homo sapiens
gttgctgccatcattcattgtgaaaccggagagatacact

SEQ ID NO: 75059 - DNA, 40 bp, Homo sapiens
agtgtatctctccggtttcacaatgaatgatggcagcaac

SEQ ID NO: 75060 - DNA, 40 bp, Homo sapiens
ttgctgccatcattcattgtgaaaccggagagatacactt

SEQ ID NO: 75061 - DNA, 40 bp, Homo sapiens
aagtgtatctctccggtttcacaatgaatgatggcagcaa

SEQ ID NO: 75062 - DNA, 40 bp, Homo sapiens
tgctgccatcattcattgtgaaaccggagagatacacttt

SEQ ID NO: 75063 - DNA, 40 bp, Homo sapiens
aaagtgtatctctccggtttcacaatgaatgatggcagca

SEQ ID NO: 75064 - DNA, 40 bp, Homo sapiens
gctgccatcattcattgtgaaaccggagagatacacttta

SEQ ID NO: 75065 - DNA, 40 bp, Homo sapiens
taaagtgtatctctccggtttcacaatgaatgatggcagc

SEQ ID NO: 75066 - DNA, 40 bp, Homo sapiens
ctgccatcattcattgtgaaaccggagagatacactttaa

SEQ ID NO: 75067 - DNA, 40 bp, Homo sapiens
ttaaagtgtatctctccggtttcacaatgaatgatggcag

SEQ ID NO: 75068 - DNA, 40 bp, Homo sapiens
tgccatcattcattgtgaaaccggagagatacactttaaa

SEQ ID NO: 75069 - DNA, 40 bp, Homo sapiens
tttaaagtgtatctctccggtttcacaatgaatgatggca

SEQ ID NO: 75070 - DNA, 40 bp, Homo sapiens
gccatcattcattgtgaaaccggagagatacactttaaag

SEQ ID NO: 75071 - DNA, 40 bp, Homo sapiens
ctttaaagtgtatctctccggtttcacaatgaatgatggc

SEQ ID NO: 75072 - DNA, 40 bp, Homo sapiens
ccatcattcattgtgaaaccggagagatacactttaaaga

SEQ ID NO: 75073 - DNA, 40 bp, Homo sapiens
tctttaaagtgtatctctccggtttcacaatgaatgatgg

SEQ ID NO: 75074 - DNA, 40 bp, Homo sapiens
catcattcattgtgaaaccggagagatacactttaaagaa

SEQ ID NO: 75075 - DNA, 40 bp, Homo sapiens
ttctttaaagtgtatctctccggtttcacaatgaatgatg

SEQ ID NO: 75076 - DNA, 40 bp, Homo sapiens
atcattcattgtgaaaccggagagatacactttaaagaaa

SEQ ID NO: 75077 - DNA, 40 bp, Homo sapiens
tttctttaaagtgtatctctccggtttcacaatgaatgat

SEQ ID NO: 75078 - DNA, 40 bp, Homo sapiens
tcattcattgtgaaaccggagagatacactttaaagaaat

SEQ ID NO: 75079 - DNA, 40 bp, Homo sapiens
atttctttaaagtgtatctctccggtttcacaatgaatga

SEQ ID NO: 75080 - DNA, 40 bp, Homo sapiens
cattcattgtgaaaccggagagatacactttaaagaaatg

SEQ ID NO: 75081 - DNA, 40 bp, Homo sapiens
catttctttaaagtgtatctctccggtttcacaatgaatg

SEQ ID NO: 75082 - DNA, 40 bp, Homo sapiens
attcattgtgaaaccggagagatacactttaaagaaatgt

SEQ ID NO: 75083 - DNA, 40 bp, Homo sapiens
acatttctttaaagtgtatctctccggtttcacaatgaat

SEQ ID NO: 75084 - DNA, 40 bp, Homo sapiens
ttcattgtgaaaccggagagatacactttaaagaaatgtc

SEQ ID NO: 75085 - DNA, 40 bp, Homo sapiens
gacatttctttaaagtgtatctctccggtttcacaatgaa

SEQ ID NO: 75086 - DNA, 40 bp, Homo sapiens
tcattgtgaaaccggagagatacactttaaagaaatgtca

SEQ ID NO: 75087 - DNA, 40 bp, Homo sapiens
tgacatttctttaaagtgtatctctccggtttcacaatga

SEQ ID NO: 75088 - DNA, 40 bp, Homo sapiens
cattgtgaaaccggagagatacactttaaagaaatgtcat

SEQ ID NO: 75089 - DNA, 40 bp, Homo sapiens
atgacatttctttaaagtgtatctctccggtttcacaatg

SEQ ID NO: 75090 - DNA, 40 bp, Homo sapiens
attgtgaaaccggagagatacactttaaagaaatgtcatt

SEQ ID NO: 75091 - DNA, 40 bp, Homo sapiens
aatgacatttctttaaagtgtatctctccggtttcacaat

SEQ ID NO: 75092 - DNA, 40 bp, Homo sapiens
ttgtgaaaccggagagatacactttaaagaaatgtcattt

SEQ ID NO: 75093 - DNA, 40 bp, Homo sapiens
aaatgacatttctttaaagtgtatctctccggtttcacaa

SEQ ID NO: 75094 - DNA, 40 bp, Homo sapiens
tgtgaaaccggagagatacactttaaagaaatgtcatttt

SEQ ID NO: 75095 - DNA, 40 bp, Homo sapiens
aaaatgacatttctttaaagtgtatctctccggtttcaca

SEQ ID NO: 75096 - DNA, 40 bp, Homo sapiens
gtgaaaccggagagatacactttaaagaaatgtcattttt

SEQ ID NO: 75097 - DNA, 40 bp, Homo sapiens
aaaaatgacatttctttaaagtgtatctctccggtttcac

SEQ ID NO: 75098 - DNA, 40 bp, Homo sapiens
tgaaaccggagagatacactttaaagaaatgtcatttttg

SEQ ID NO: 75099 - DNA, 40 bp, Homo sapiens
caaaaatgacatttctttaaagtgtatctctccggtttca

SEQ ID NO: 75100 - DNA, 40 bp, Homo sapiens
gaaaccggagagatacactttaaagaaatgtcatttttgg

SEQ ID NO: 75101 - DNA, 40 bp, Homo sapiens
ccaaaaatgacatttctttaaagtgtatctctccggtttc

SEQ ID NO: 75102 - DNA, 40 bp, Homo sapiens
aaaccggagagatacactttaaagaaatgtcatttttggc

SEQ ID NO: 75103 - DNA, 40 bp, Homo sapiens
gccaaaaatgacatttctttaaagtgtatctctccggttt

SEQ ID NO: 75104 - DNA, 40 bp, Homo sapiens
aaccggagagatacactttaaagaaatgtcatttttggcc

SEQ ID NO: 75105 - DNA, 40 bp, Homo sapiens
ggccaaaaatgacatttctttaaagtgtatctctccggtt

SEQ ID NO: 75106 - DNA, 40 bp, Homo sapiens
accggagagatacactttaaagaaatgtcatttttggccg

SEQ ID NO: 75107 - DNA, 40 bp, Homo sapiens
cggccaaaaatgacatttctttaaagtgtatctctccggt

SEQ ID NO: 75108 - DNA, 40 bp, Homo sapiens
ccggagagatacactttaaagaaatgtcatttttggccgg

SEQ ID NO: 75109 - DNA, 40 bp, Homo sapiens
ccggccaaaaatgacatttctttaaagtgtatctctccgg

SEQ ID NO: 75110 - DNA, 40 bp, Homo sapiens
cggagagatacactttaaagaaatgtcatttttggccggg

SEQ ID NO: 75111 - DNA, 40 bp, Homo sapiens
cccggccaaaaatgacatttctttaaagtgtatctctccg

SEQ ID NO: 75112 - DNA, 40 bp, Homo sapiens
ggagagatacactttaaagaaatgtcatttttggccgggc

SEQ ID NO: 75113 - DNA, 40 bp, Homo sapiens
gcccggccaaaaatgacatttctttaaagtgtatctctcc

SEQ ID NO: 75114 - DNA, 40 bp, Homo sapiens
gagagatacactttaaagaaatgtcatttttggccgggcg

SEQ ID NO: 75115 - DNA, 40 bp, Homo sapiens
cgcccggccaaaaatgacatttctttaaagtgtatctctc

SEQ ID NO: 75116 - DNA, 40 bp, Homo sapiens
agagatacactttaaagaaatgtcatttttggccgggcgc

SEQ ID NO: 75117 - DNA, 40 bp, Homo sapiens
gcgcccggccaaaaatgacatttctttaaagtgtatctct

SEQ ID NO: 75118 - DNA, 40 bp, Homo sapiens
gagatacactttaaagaaatgtcatttttggccgggcgcg

SEQ ID NO: 75119 - DNA, 40 bp, Homo sapiens
cgcgcccggccaaaaatgacatttctttaaagtgtatctc

SEQ ID NO: 75120 - DNA, 40 bp, Homo sapiens
agatacactttaaagaaatgtcatttttggccgggcgcgg

SEQ ID NO: 75121 - DNA, 40 bp, Homo sapiens
ccgcgcccggccaaaaatgacatttctttaaagtgtatct

SEQ ID NO: 75122 - DNA, 40 bp, Homo sapiens
gatacactttaaagaaatgtcatttttggccgggcgcggt

SEQ ID NO: 75123 - DNA, 40 bp, Homo sapiens
accgcgcccggccaaaaatgacatttctttaaagtgtatc

SEQ ID NO: 75124 - DNA, 40 bp, Homo sapiens
atacactttaaagaaatgtcatttttggccgggcgcggtg

SEQ ID NO: 75125 - DNA, 40 bp, Homo sapiens
caccgcgcccggccaaaaatgacatttctttaaagtgtat

SEQ ID NO: 75126 - DNA, 40 bp, Homo sapiens
tacactttaaagaaatgtcatttttggccgggcgcggtgg

SEQ ID NO: 75127 - DNA, 40 bp, Homo sapiens
ccaccgcgcccggccaaaaatgacatttctttaaagtgta

SEQ ID NO: 75128 - DNA, 40 bp, Homo sapiens
acactttaaagaaatgtcatttttggccgggcgcggtggc

SEQ ID NO: 75129 - DNA, 40 bp, Homo sapiens
gccaccgcgcccggccaaaaatgacatttctttaaagtgt

SEQ ID NO: 75130 - DNA, 40 bp, Homo sapiens
cactttaaagaaatgtcatttttggccgggcgcggtggct

SEQ ID NO: 75131 - DNA, 40 bp, Homo sapiens
agccaccgcgcccggccaaaaatgacatttctttaaagtg

SEQ ID NO: 75132 - DNA, 40 bp, Homo sapiens
actttaaagaaatgtcatttttggccgggcgcggtggctc

SEQ ID NO: 75133 - DNA, 40 bp, Homo sapiens
gagccaccgcgcccggccaaaaatgacatttctttaaagt

SEQ ID NO: 75134 - DNA, 40 bp, Homo sapiens
ctttaaagaaatgtcatttttggccgggcgcggtggctca

SEQ ID NO: 75135 - DNA, 40 bp, Homo sapiens
tgagccaccgcgcccggccaaaaatgacatttctttaaag

SEQ ID NO: 75136 - DNA, 40 bp, Homo sapiens
tttaaagaaatgtcatttttggccgggcgcggtggctcac

SEQ ID NO: 75137 - DNA, 40 bp, Homo sapiens
gtgagccaccgcgcccggccaaaaatgacatttctttaaa

SEQ ID NO: 75138 - DNA, 40 bp, Homo sapiens
ttaaagaaatgtcatttttggccgggcgcggtggctcacg

SEQ ID NO: 75139 - DNA, 40 bp, Homo sapiens
cgtgagccaccgcgcccggccaaaaatgacatttctttaa

SEQ ID NO: 75140 - DNA, 40 bp, Homo sapiens
taaagaaatgtcatttttggccgggcgcggtggctcacgc

SEQ ID NO: 75141 - DNA, 40 bp, Homo sapiens
gcgtgagccaccgcgcccggccaaaaatgacatttcttta

SEQ ID NO: 75142 - DNA, 40 bp, Homo sapiens
aaagaaatgtcatttttggccgggcgcggtggctcacgcc

SEQ ID NO: 75143 - DNA, 40 bp, Homo sapiens
ggcgtgagccaccgcgcccggccaaaaatgacatttcttt

SEQ ID NO: 75144 - DNA, 40 bp, Homo sapiens
aagaaatgtcatttttggccgggcgcggtggctcacgcct

SEQ ID NO: 75145 - DNA, 40 bp, Homo sapiens
aggcgtgagccaccgcgcccggccaaaaatgacatttctt

SEQ ID NO: 75146 - DNA, 40 bp, Homo sapiens
agaaatgtcatttttggccgggcgcggtggctcacgcctg

SEQ ID NO: 75147 - DNA, 40 bp, Homo sapiens
caggcgtgagccaccgcgcccggccaaaaatgacatttct

SEQ ID NO: 75148 - DNA, 40 bp, Homo sapiens
gaaatgtcatttttggccgggcgcggtggctcacgcctgt

SEQ ID NO: 75149 - DNA, 40 bp, Homo sapiens
acaggcgtgagccaccgcgcccggccaaaaatgacatttc

SEQ ID NO: 75150 - DNA, 40 bp, Homo sapiens
aaatgtcatttttggccgggcgcggtggctcacgcctgta

SEQ ID NO: 75151 - DNA, 40 bp, Homo sapiens
tacaggcgtgagccaccgcgcccggccaaaaatgacattt

SEQ ID NO: 75152 - DNA, 40 bp, Homo sapiens
aatgtcatttttggccgggcgcggtggctcacgcctgtaa

SEQ ID NO: 75153 - DNA, 40 bp, Homo sapiens
ttacaggcgtgagccaccgcgcccggccaaaaatgacatt

SEQ ID NO: 75154 - DNA, 40 bp, Homo sapiens
atgtcatttttggccgggcgcggtggctcacgcctgtaat

SEQ ID NO: 75155 - DNA, 40 bp, Homo sapiens
attacaggcgtgagccaccgcgcccggccaaaaatgacat

SEQ ID NO: 75156 - DNA, 40 bp, Homo sapiens
tgtcatttttggccgggcgcggtggctcacgcctgtaatc

SEQ ID NO: 75157 - DNA, 40 bp, Homo sapiens
gattacaggcgtgagccaccgcgcccggccaaaaatgaca

SEQ ID NO: 75158 - DNA, 40 bp, Homo sapiens
gtcatttttggccgggcgcggtggctcacgcctgtaatcc

SEQ ID NO: 75159 - DNA, 40 bp, Homo sapiens
ggattacaggcgtgagccaccgcgcccggccaaaaatgac

SEQ ID NO: 75160 - DNA, 40 bp, Homo sapiens
tcatttttggccgggcgcggtggctcacgcctgtaatccc

SEQ ID NO: 75161 - DNA, 40 bp, Homo sapiens
gggattacaggcgtgagccaccgcgcccggccaaaaatga

SEQ ID NO: 75162 - DNA, 40 bp, Homo sapiens
catttttggccgggcgcggtggctcacgcctgtaatccca

SEQ ID NO: 75163 - DNA, 40 bp, Homo sapiens
tgggattacaggcgtgagccaccgcgcccggccaaaaatg

SEQ ID NO: 75164 - DNA, 40 bp, Homo sapiens
atttttggccgggcgcggtggctcacgcctgtaatcccag

SEQ ID NO: 75165 - DNA, 40 bp, Homo sapiens
ctgggattacaggcgtgagccaccgcgcccggccaaaaat

SEQ ID NO: 75166 - DNA, 40 bp, Homo sapiens
tttttggccgggcgcggtggctcacgcctgtaatcccagc

SEQ ID NO: 75167 - DNA, 40 bp, Homo sapiens
gctgggattacaggcgtgagccaccgcgcccggccaaaaa

SEQ ID NO: 75168 - DNA, 40 bp, Homo sapiens
ttttggccgggcgcggtggctcacgcctgtaatcccagca

SEQ ID NO: 75169 - DNA, 40 bp, Homo sapiens
tgctgggattacaggcgtgagccaccgcgcccggccaaaa

SEQ ID NO: 75170 - DNA, 40 bp, Homo sapiens
tttggccgggcgcggtggctcacgcctgtaatcccagcac

SEQ ID NO: 75171 - DNA, 40 bp, Homo sapiens
gtgctgggattacaggcgtgagccaccgcgcccggccaaa

SEQ ID NO: 75172 - DNA, 40 bp, Homo sapiens
ttggccgggcgcggtggctcacgcctgtaatcccagcact

SEQ ID NO: 75173 - DNA, 40 bp, Homo sapiens
agtgctgggattacaggcgtgagccaccgcgcccggccaa

SEQ ID NO: 75174 - DNA, 40 bp, Homo sapiens
tggccgggcgcggtggctcacgcctgtaatcccagcactt

SEQ ID NO: 75175 - DNA, 40 bp, Homo sapiens
aagtgctgggattacaggcgtgagccaccgcgcccggcca

SEQ ID NO: 75176 - DNA, 40 bp, Homo sapiens
ggccgggcgcggtggctcacgcctgtaatcccagcacttt

SEQ ID NO: 75177 - DNA, 40 bp, Homo sapiens
aaagtgctgggattacaggcgtgagccaccgcgcccggcc

SEQ ID NO: 75178 - DNA, 40 bp, Homo sapiens
gccgggcgcggtggctcacgcctgtaatcccagcactttg

SEQ ID NO: 75179 - DNA, 40 bp, Homo sapiens
caaagtgctgggattacaggcgtgagccaccgcgcccggc

SEQ ID NO: 75180 - DNA, 40 bp, Homo sapiens
ccgggcgcggtggctcacgcctgtaatcccagcactttgg

SEQ ID NO: 75181 - DNA, 40 bp, Homo sapiens
ccaaagtgctgggattacaggcgtgagccaccgcgcccgg

SEQ ID NO: 75182 - DNA, 40 bp, Homo sapiens
cgggcgcggtggctcacgcctgtaatcccagcactttggg

SEQ ID NO: 75183 - DNA, 40 bp, Homo sapiens
cccaaagtgctgggattacaggcgtgagccaccgcgcccg

SEQ ID NO: 75184 - DNA, 40 bp, Homo sapiens
gggcgcggtggctcacgcctgtaatcccagcactttggga

SEQ ID NO: 75185 - DNA, 40 bp, Homo sapiens
tcccaaagtgctgggattacaggcgtgagccaccgcgccc

SEQ ID NO: 75186 - DNA, 40 bp, Homo sapiens
ggcgcggtggctcacgcctgtaatcccagcactttgggag

SEQ ID NO: 75187 - DNA, 40 bp, Homo sapiens
ctcccaaagtgctgggattacaggcgtgagccaccgcgcc

SEQ ID NO: 75188 - DNA, 40 bp, Homo sapiens
gcgcggtggctcacgcctgtaatcccagcactttgggagg

SEQ ID NO: 75189 - DNA, 40 bp, Homo sapiens
cctcccaaagtgctgggattacaggcgtgagccaccgcgc

SEQ ID NO: 75190 - DNA, 40 bp, Homo sapiens
cgcggtggctcacgcctgtaatcccagcactttgggaggc

SEQ ID NO: 75191 - DNA, 40 bp, Homo sapiens
gcctcccaaagtgctgggattacaggcgtgagccaccgcg

SEQ ID NO: 75192 - DNA, 40 bp, Homo sapiens
gcggtggctcacgcctgtaatcccagcactttgggaggcc

SEQ ID NO: 75193 - DNA, 40 bp, Homo sapiens
ggcctcccaaagtgctgggattacaggcgtgagccaccgc

SEQ ID NO: 75194 - DNA, 40 bp, Homo sapiens
cggtggctcacgcctgtaatcccagcactttgggaggcct

SEQ ID NO: 75195 - DNA, 40 bp, Homo sapiens
aggcctcccaaagtgctgggattacaggcgtgagccaccg

SEQ ID NO: 75196 - DNA, 40 bp, Homo sapiens
ggtggctcacgcctgtaatcccagcactttgggaggccta

SEQ ID NO: 75197 - DNA, 40 bp, Homo sapiens
taggcctcccaaagtgctgggattacaggcgtgagccacc

SEQ ID NO: 75198 - DNA, 40 bp, Homo sapiens
gtggctcacgcctgtaatcccagcactttgggaggcctag

SEQ ID NO: 75199 - DNA, 40 bp, Homo sapiens
ctaggcctcccaaagtgctgggattacaggcgtgagccac

SEQ ID NO: 75200 - DNA, 40 bp, Homo sapiens
tggctcacgcctgtaatcccagcactttgggaggcctagg

SEQ ID NO: 75201 - DNA, 40 bp, Homo sapiens
cctaggcctcccaaagtgctgggattacaggcgtgagcca

SEQ ID NO: 75202 - DNA, 40 bp, Homo sapiens
ggctcacgcctgtaatcccagcactttgggaggcctaggc

SEQ ID NO: 75203 - DNA, 40 bp, Homo sapiens
gcctaggcctcccaaagtgctgggattacaggcgtgagcc

SEQ ID NO: 75204 - DNA, 40 bp, Homo sapiens
gctcacgcctgtaatcccagcactttgggaggcctaggcg

SEQ ID NO: 75205 - DNA, 40 bp, Homo sapiens
cgcctaggcctcccaaagtgctgggattacaggcgtgagc

SEQ ID NO: 75206 - DNA, 40 bp, Homo sapiens
ctcacgcctgtaatcccagcactttgggaggcctaggcgg

SEQ ID NO: 75207 - DNA, 40 bp, Homo sapiens
ccgcctaggcctcccaaagtgctgggattacaggcgtgag

SEQ ID NO: 75208 - DNA, 40 bp, Homo sapiens
tcacgcctgtaatcccagcactttgggaggcctaggcggg

SEQ ID NO: 75209 - DNA, 40 bp, Homo sapiens
cccgcctaggcctcccaaagtgctgggattacaggcgtga

SEQ ID NO: 75210 - DNA, 40 bp, Homo sapiens
cacgcctgtaatcccagcactttgggaggcctaggcgggt

SEQ ID NO: 75211 - DNA, 40 bp, Homo sapiens
acccgcctaggcctcccaaagtgctgggattacaggcgtg

SEQ ID NO: 75212 - DNA, 40 bp, Homo sapiens
acgcctgtaatcccagcactttgggaggcctaggcgggtg

SEQ ID NO: 75213 - DNA, 40 bp, Homo sapiens
cacccgcctaggcctcccaaagtgctgggattacaggcgt

SEQ ID NO: 75214 - DNA, 40 bp, Homo sapiens
cgcctgtaatcccagcactttgggaggcctaggcgggtga

SEQ ID NO: 75215 - DNA, 40 bp, Homo sapiens
tcacccgcctaggcctcccaaagtgctgggattacaggcg

SEQ ID NO: 75216 - DNA, 40 bp, Homo sapiens
gcctgtaatcccagcactttgggaggcctaggcgggtgat

SEQ ID NO: 75217 - DNA, 40 bp, Homo sapiens
atcacccgcctaggcctcccaaagtgctgggattacaggc

SEQ ID NO: 75218 - DNA, 40 bp, Homo sapiens
cctgtaatcccagcactttgggaggcctaggcgggtgatc

SEQ ID NO: 75219 - DNA, 40 bp, Homo sapiens
gatcacccgcctaggcctcccaaagtgctgggattacagg

SEQ ID NO: 75220 - DNA, 40 bp, Homo sapiens
ctgtaatcccagcactttgggaggcctaggcgggtgatca

SEQ ID NO: 75221 - DNA, 40 bp, Homo sapiens
tgatcacccgcctaggcctcccaaagtgctgggattacag

SEQ ID NO: 75222 - DNA, 40 bp, Homo sapiens
tgtaatcccagcactttgggaggcctaggcgggtgatcac

SEQ ID NO: 75223 - DNA, 40 bp, Homo sapiens
gtgatcacccgcctaggcctcccaaagtgctgggattaca

SEQ ID NO: 75224 - DNA, 40 bp, Homo sapiens
gtaatcccagcactttgggaggcctaggcgggtgatcacc

SEQ ID NO: 75225 - DNA, 40 bp, Homo sapiens
ggtgatcacccgcctaggcctcccaaagtgctgggattac

SEQ ID NO: 75226 - DNA, 40 bp, Homo sapiens
taatcccagcactttgggaggcctaggcgggtgatcacct

SEQ ID NO: 75227 - DNA, 40 bp, Homo sapiens
aggtgatcacccgcctaggcctcccaaagtgctgggatta

SEQ ID NO: 75228 - DNA, 40 bp, Homo sapiens
aatcccagcactttgggaggcctaggcgggtgatcacctg

SEQ ID NO: 75229 - DNA, 40 bp, Homo sapiens
caggtgatcacccgcctaggcctcccaaagtgctgggatt

SEQ ID NO: 75230 - DNA, 40 bp, Homo sapiens
atcccagcactttgggaggcctaggcgggtgatcacctga

SEQ ID NO: 75231 - DNA, 40 bp, Homo sapiens
tcaggtgatcacccgcctaggcctcccaaagtgctgggat

SEQ ID NO: 75232 - DNA, 40 bp, Homo sapiens
tcccagcactttgggaggcctaggcgggtgatcacctgag

SEQ ID NO: 75233 - DNA, 40 bp, Homo sapiens
ctcaggtgatcacccgcctaggcctcccaaagtgctggga

SEQ ID NO: 75234 - DNA, 40 bp, Homo sapiens
cccagcactttgggaggcctaggcgggtgatcacctgagg

SEQ ID NO: 75235 - DNA, 40 bp, Homo sapiens
cctcaggtgatcacccgcctaggcctcccaaagtgctggg

SEQ ID NO: 75236 - DNA, 40 bp, Homo sapiens
ccagcactttgggaggcctaggcgggtgatcacctgaggt

SEQ ID NO: 75237 - DNA, 40 bp, Homo sapiens
acctcaggtgatcacccgcctaggcctcccaaagtgctgg

SEQ ID NO: 75238 - DNA, 40 bp, Homo sapiens
cagcactttgggaggcctaggcgggtgatcacctgaggtc

SEQ ID NO: 75239 - DNA, 40 bp, Homo sapiens
gacctcaggtgatcacccgcctaggcctcccaaagtgctg

SEQ ID NO: 75240 - DNA, 40 bp, Homo sapiens
agcactttgggaggcctaggcgggtgatcacctgaggtca

SEQ ID NO: 75241 - DNA, 40 bp, Homo sapiens
tgacctcaggtgatcacccgcctaggcctcccaaagtgct

SEQ ID NO: 75242 - DNA, 40 bp, Homo sapiens
gcactttgggaggcctaggcgggtgatcacctgaggtcag

SEQ ID NO: 75243 - DNA, 40 bp, Homo sapiens
ctgacctcaggtgatcacccgcctaggcctcccaaagtgc

SEQ ID NO: 75244 - DNA, 40 bp, Homo sapiens
cactttgggaggcctaggcgggtgatcacctgaggtcagg

SEQ ID NO: 75245 - DNA, 40 bp, Homo sapiens
cctgacctcaggtgatcacccgcctaggcctcccaaagtg

SEQ ID NO: 75246 - DNA, 40 bp, Homo sapiens
actttgggaggcctaggcgggtgatcacctgaggtcagga

SEQ ID NO: 75247 - DNA, 40 bp, Homo sapiens
tcctgacctcaggtgatcacccgcctaggcctcccaaagt

SEQ ID NO: 75248 - DNA, 40 bp, Homo sapiens
ctttgggaggcctaggcgggtgatcacctgaggtcaggag

SEQ ID NO: 75249 - DNA, 40 bp, Homo sapiens
ctcctgacctcaggtgatcacccgcctaggcctcccaaag

SEQ ID NO: 75250 - DNA, 40 bp, Homo sapiens
tttgggaggcctaggcgggtgatcacctgaggtcaggagt

SEQ ID NO: 75251 - DNA, 40 bp, Homo sapiens
actcctgacctcaggtgatcacccgcctaggcctcccaaa

SEQ ID NO: 75252 - DNA, 40 bp, Homo sapiens
ttgggaggcctaggcgggtgatcacctgaggtcaggagtt

SEQ ID NO: 75253 - DNA, 40 bp, Homo sapiens
aactcctgacctcaggtgatcacccgcctaggcctcccaa

SEQ ID NO: 75254 - DNA, 40 bp, Homo sapiens
tgggaggcctaggcgggtgatcacctgaggtcaggagttc

SEQ ID NO: 75255 - DNA, 40 bp, Homo sapiens
gaactcctgacctcaggtgatcacccgcctaggcctccca

SEQ ID NO: 75256 - DNA, 40 bp, Homo sapiens
gggaggcctaggcgggtgatcacctgaggtcaggagttca

SEQ ID NO: 75257 - DNA, 40 bp, Homo sapiens
tgaactcctgacctcaggtgatcacccgcctaggcctccc

SEQ ID NO: 75258 - DNA, 40 bp, Homo sapiens
ggaggcctaggcgggtgatcacctgaggtcaggagttcaa

SEQ ID NO: 75259 - DNA, 40 bp, Homo sapiens
ttgaactcctgacctcaggtgatcacccgcctaggcctcc

SEQ ID NO: 75260 - DNA, 40 bp, Homo sapiens
gaggcctaggcgggtgatcacctgaggtcaggagttcaag

SEQ ID NO: 75261 - DNA, 40 bp, Homo sapiens
cttgaactcctgacctcaggtgatcacccgcctaggcctc

SEQ ID NO: 75262 - DNA, 40 bp, Homo sapiens
aggcctaggcgggtgatcacctgaggtcaggagttcaaga

SEQ ID NO: 75263 - DNA, 40 bp, Homo sapiens
tcttgaactcctgacctcaggtgatcacccgcctaggcct

SEQ ID NO: 75264 - DNA, 40 bp, Homo sapiens
ggcctaggcgggtgatcacctgaggtcaggagttcaagac

SEQ ID NO: 75265 - DNA, 40 bp, Homo sapiens
gtcttgaactcctgacctcaggtgatcacccgcctaggcc

SEQ ID NO: 75266 - DNA, 40 bp, Homo sapiens
gcctaggcgggtgatcacctgaggtcaggagttcaagacc

SEQ ID NO: 75267 - DNA, 40 bp, Homo sapiens
ggtcttgaactcctgacctcaggtgatcacccgcctaggc

SEQ ID NO: 75268 - DNA, 40 bp, Homo sapiens
cctaggcgggtgatcacctgaggtcaggagttcaagacca

SEQ ID NO: 75269 - DNA, 40 bp, Homo sapiens
tggtcttgaactcctgacctcaggtgatcacccgcctagg

SEQ ID NO: 75270 - DNA, 40 bp, Homo sapiens
ctaggcgggtgatcacctgaggtcaggagttcaagaccag

SEQ ID NO: 75271 - DNA, 40 bp, Homo sapiens
ctggtcttgaactcctgacctcaggtgatcacccgcctag

SEQ ID NO: 75272 - DNA, 40 bp, Homo sapiens
taggcgggtgatcacctgaggtcaggagttcaagaccagc

SEQ ID NO: 75273 - DNA, 40 bp, Homo sapiens
gctggtcttgaactcctgacctcaggtgatcacccgccta

SEQ ID NO: 75274 - DNA, 40 bp, Homo sapiens
aggcgggtgatcacctgaggtcaggagttcaagaccagcc

SEQ ID NO: 75275 - DNA, 40 bp, Homo sapiens
ggctggtcttgaactcctgacctcaggtgatcacccgcct

SEQ ID NO: 75276 - DNA, 40 bp, Homo sapiens
ggcgggtgatcacctgaggtcaggagttcaagaccagcct

SEQ ID NO: 75277 - DNA, 40 bp, Homo sapiens
aggctggtcttgaactcctgacctcaggtgatcacccgcc

SEQ ID NO: 75278 - DNA, 40 bp, Homo sapiens
gcgggtgatcacctgaggtcaggagttcaagaccagcctg

SEQ ID NO: 75279 - DNA, 40 bp, Homo sapiens
caggctggtcttgaactcctgacctcaggtgatcacccgc

SEQ ID NO: 75280 - DNA, 40 bp, Homo sapiens
cgggtgatcacctgaggtcaggagttcaagaccagcctgg

SEQ ID NO: 75281 - DNA, 40 bp, Homo sapiens
ccaggctggtcttgaactcctgacctcaggtgatcacccg

SEQ ID NO: 75282 - DNA, 40 bp, Homo sapiens
gggtgatcacctgaggtcaggagttcaagaccagcctggc

SEQ ID NO: 75283 - DNA, 40 bp, Homo sapiens
gccaggctggtcttgaactcctgacctcaggtgatcaccc

SEQ ID NO: 75284 - DNA, 40 bp, Homo sapiens
ggtgatcacctgaggtcaggagttcaagaccagcctggct

SEQ ID NO: 75285 - DNA, 40 bp, Homo sapiens
agccaggctggtcttgaactcctgacctcaggtgatcacc

SEQ ID NO: 75286 - DNA, 40 bp, Homo sapiens
gtgatcacctgaggtcaggagttcaagaccagcctggcta

SEQ ID NO: 75287 - DNA, 40 bp, Homo sapiens
tagccaggctggtcttgaactcctgacctcaggtgatcac

SEQ ID NO: 75288 - DNA, 40 bp, Homo sapiens
tgatcacctgaggtcaggagttcaagaccagcctggctaa

SEQ ID NO: 75289 - DNA, 40 bp, Homo sapiens
ttagccaggctggtcttgaactcctgacctcaggtgatca

SEQ ID NO: 75290 - DNA, 40 bp, Homo sapiens
gatcacctgaggtcaggagttcaagaccagcctggctaac

SEQ ID NO: 75291 - DNA, 40 bp, Homo sapiens
gttagccaggctggtcttgaactcctgacctcaggtgatc

SEQ ID NO: 75292 - DNA, 40 bp, Homo sapiens
atcacctgaggtcaggagttcaagaccagcctggctaaca

SEQ ID NO: 75293 - DNA, 40 bp, Homo sapiens
tgttagccaggctggtcttgaactcctgacctcaggtgat

SEQ ID NO: 75294 - DNA, 40 bp, Homo sapiens
tcacctgaggtcaggagttcaagaccagcctggctaacat

SEQ ID NO: 75295 - DNA, 40 bp, Homo sapiens
atgttagccaggctggtcttgaactcctgacctcaggtga

SEQ ID NO: 75296 - DNA, 40 bp, Homo sapiens
cacctgaggtcaggagttcaagaccagcctggctaacatg

SEQ ID NO: 75297 - DNA, 40 bp, Homo sapiens
catgttagccaggctggtcttgaactcctgacctcaggtg

SEQ ID NO: 75298 - DNA, 40 bp, Homo sapiens
acctgaggtcaggagttcaagaccagcctggctaacatgg

SEQ ID NO: 75299 - DNA, 40 bp, Homo sapiens
ccatgttagccaggctggtcttgaactcctgacctcaggt

SEQ ID NO: 75300 - DNA, 40 bp, Homo sapiens
cctgaggtcaggagttcaagaccagcctggctaacatggt

SEQ ID NO: 75301 - DNA, 40 bp, Homo sapiens
accatgttagccaggctggtcttgaactcctgacctcagg

SEQ ID NO: 75302 - DNA, 40 bp, Homo sapiens
ctgaggtcaggagttcaagaccagcctggctaacatggtg

SEQ ID NO: 75303 - DNA, 40 bp, Homo sapiens
caccatgttagccaggctggtcttgaactcctgacctcag

SEQ ID NO: 75304 - DNA, 40 bp, Homo sapiens
tgaggtcaggagttcaagaccagcctggctaacatggtga

SEQ ID NO: 75305 - DNA, 40 bp, Homo sapiens
tcaccatgttagccaggctggtcttgaactcctgacctca

SEQ ID NO: 75306 - DNA, 40 bp, Homo sapiens
gaggtcaggagttcaagaccagcctggctaacatggtgaa

SEQ ID NO: 75307 - DNA, 40 bp, Homo sapiens
ttcaccatgttagccaggctggtcttgaactcctgacctc

SEQ ID NO: 75308 - DNA, 40 bp, Homo sapiens
aggtcaggagttcaagaccagcctggctaacatggtgaaa

SEQ ID NO: 75309 - DNA, 40 bp, Homo sapiens
tttcaccatgttagccaggctggtcttgaactcctgacct

SEQ ID NO: 75310 - DNA, 40 bp, Homo sapiens
ggtcaggagttcaagaccagcctggctaacatggtgaaac

SEQ ID NO: 75311 - DNA, 40 bp, Homo sapiens
gtttcaccatgttagccaggctggtcttgaactcctgacc

SEQ ID NO: 75312 - DNA, 40 bp, Homo sapiens
gtcaggagttcaagaccagcctggctaacatggtgaaacc

SEQ ID NO: 75313 - DNA, 40 bp, Homo sapiens
ggtttcaccatgttagccaggctggtcttgaactcctgac

SEQ ID NO: 75314 - DNA, 40 bp, Homo sapiens
tcaggagttcaagaccagcctggctaacatggtgaaaccc

SEQ ID NO: 75315 - DNA, 40 bp, Homo sapiens
gggtttcaccatgttagccaggctggtcttgaactcctga

SEQ ID NO: 75316 - DNA, 40 bp, Homo sapiens
caggagttcaagaccagcctggctaacatggtgaaaccct

SEQ ID NO: 75317 - DNA, 40 bp, Homo sapiens
agggtttcaccatgttagccaggctggtcttgaactcctg

SEQ ID NO: 75318 - DNA, 40 bp, Homo sapiens
aggagttcaagaccagcctggctaacatggtgaaacccta

SEQ ID NO: 75319 - DNA, 40 bp, Homo sapiens
tagggtttcaccatgttagccaggctggtcttgaactcct

SEQ ID NO: 75320 - DNA, 40 bp, Homo sapiens
ggagttcaagaccagcctggctaacatggtgaaaccctat

SEQ ID NO: 75321 - DNA, 40 bp, Homo sapiens
atagggtttcaccatgttagccaggctggtcttgaactcc

SEQ ID NO: 75322 - DNA, 40 bp, Homo sapiens
gagttcaagaccagcctggctaacatggtgaaaccctatt

SEQ ID NO: 75323 - DNA, 40 bp, Homo sapiens
aatagggtttcaccatgttagccaggctggtcttgaactc

SEQ ID NO: 75324 - DNA, 40 bp, Homo sapiens
agttcaagaccagcctggctaacatggtgaaaccctattt

SEQ ID NO: 75325 - DNA, 40 bp, Homo sapiens
aaatagggtttcaccatgttagccaggctggtcttgaact

SEQ ID NO: 75326 - DNA, 40 bp, Homo sapiens
gttcaagaccagcctggctaacatggtgaaaccctatttc

SEQ ID NO: 75327 - DNA, 40 bp, Homo sapiens
gaaatagggtttcaccatgttagccaggctggtcttgaac

SEQ ID NO: 75328 - DNA, 40 bp, Homo sapiens
ttcaagaccagcctggctaacatggtgaaaccctatttct

SEQ ID NO: 75329 - DNA, 40 bp, Homo sapiens
agaaatagggtttcaccatgttagccaggctggtcttgaa

SEQ ID NO: 75330 - DNA, 40 bp, Homo sapiens
tcaagaccagcctggctaacatggtgaaaccctatttcta

SEQ ID NO: 75331 - DNA, 40 bp, Homo sapiens
tagaaatagggtttcaccatgttagccaggctggtcttga

SEQ ID NO: 75332 - DNA, 40 bp, Homo sapiens
caagaccagcctggctaacatggtgaaaccctatttctac

SEQ ID NO: 75333 - DNA, 40 bp, Homo sapiens
gtagaaatagggtttcaccatgttagccaggctggtcttg

SEQ ID NO: 75334 - DNA, 40 bp, Homo sapiens
aagaccagcctggctaacatggtgaaaccctatttctact

SEQ ID NO: 75335 - DNA, 40 bp, Homo sapiens
agtagaaatagggtttcaccatgttagccaggctggtctt

SEQ ID NO: 75336 - DNA, 40 bp, Homo sapiens
agaccagcctggctaacatggtgaaaccctatttctacta

SEQ ID NO: 75337 - DNA, 40 bp, Homo sapiens
tagtagaaatagggtttcaccatgttagccaggctggtct

SEQ ID NO: 75338 - DNA, 40 bp, Homo sapiens
gaccagcctggctaacatggtgaaaccctatttctactaa

SEQ ID NO: 75339 - DNA, 40 bp, Homo sapiens
ttagtagaaatagggtttcaccatgttagccaggctggtc

SEQ ID NO: 75340 - DNA, 40 bp, Homo sapiens
accagcctggctaacatggtgaaaccctatttctactaaa

SEQ ID NO: 75341 - DNA, 40 bp, Homo sapiens
tttagtagaaatagggtttcaccatgttagccaggctggt

SEQ ID NO: 75342 - DNA, 40 bp, Homo sapiens
ccagcctggctaacatggtgaaaccctatttctactaaaa

SEQ ID NO: 75343 - DNA, 40 bp, Homo sapiens
ttttagtagaaatagggtttcaccatgttagccaggctgg

SEQ ID NO: 75344 - DNA, 40 bp, Homo sapiens
cagcctggctaacatggtgaaaccctatttctactaaaaa

SEQ ID NO: 75345 - DNA, 40 bp, Homo sapiens
tttttagtagaaatagggtttcaccatgttagccaggctg

SEQ ID NO: 75346 - DNA, 40 bp, Homo sapiens
agcctggctaacatggtgaaaccctatttctactaaaaat

SEQ ID NO: 75347 - DNA, 40 bp, Homo sapiens
atttttagtagaaatagggtttcaccatgttagccaggct

SEQ ID NO: 75348 - DNA, 40 bp, Homo sapiens
gcctggctaacatggtgaaaccctatttctactaaaaata

SEQ ID NO: 75349 - DNA, 40 bp, Homo sapiens
tatttttagtagaaatagggtttcaccatgttagccaggc

SEQ ID NO: 75350 - DNA, 40 bp, Homo sapiens
cctggctaacatggtgaaaccctatttctactaaaaatac

SEQ ID NO: 75351 - DNA, 40 bp, Homo sapiens
gtatttttagtagaaatagggtttcaccatgttagccagg

SEQ ID NO: 75352 - DNA, 40 bp, Homo sapiens
ctggctaacatggtgaaaccctatttctactaaaaataca

SEQ ID NO: 75353 - DNA, 40 bp, Homo sapiens
tgtatttttagtagaaatagggtttcaccatgttagccag

SEQ ID NO: 75354 - DNA, 40 bp, Homo sapiens
tggctaacatggtgaaaccctatttctactaaaaatacaa

SEQ ID NO: 75355 - DNA, 40 bp, Homo sapiens
ttgtatttttagtagaaatagggtttcaccatgttagcca

SEQ ID NO: 75356 - DNA, 40 bp, Homo sapiens
ggctaacatggtgaaaccctatttctactaaaaatacaaa

SEQ ID NO: 75357 - DNA, 40 bp, Homo sapiens
tttgtatttttagtagaaatagggtttcaccatgttagcc

SEQ ID NO: 75358 - DNA, 40 bp, Homo sapiens
gctaacatggtgaaaccctatttctactaaaaatacaaaa

SEQ ID NO: 75359 - DNA, 40 bp, Homo sapiens
ttttgtatttttagtagaaatagggtttcaccatgttagc

SEQ ID NO: 75360 - DNA, 40 bp, Homo sapiens
ctaacatggtgaaaccctatttctactaaaaatacaaaaa

SEQ ID NO: 75361 - DNA, 40 bp, Homo sapiens
tttttgtatttttagtagaaatagggtttcaccatgttag

SEQ ID NO: 75362 - DNA, 40 bp, Homo sapiens
taacatggtgaaaccctatttctactaaaaatacaaaaaa

SEQ ID NO: 75363 - DNA, 40 bp, Homo sapiens
ttttttgtatttttagtagaaatagggtttcaccatgtta

SEQ ID NO: 75364 - DNA, 40 bp, Homo sapiens
aacatggtgaaaccctatttctactaaaaatacaaaaaat

SEQ ID NO: 75365 - DNA, 40 bp, Homo sapiens
attttttgtatttttagtagaaatagggtttcaccatgtt

SEQ ID NO: 75366 - DNA, 40 bp, Homo sapiens
acatggtgaaaccctatttctactaaaaatacaaaaaatt

SEQ ID NO: 75367 - DNA, 40 bp, Homo sapiens
aattttttgtatttttagtagaaatagggtttcaccatgt

SEQ ID NO: 75368 - DNA, 40 bp, Homo sapiens
catggtgaaaccctatttctactaaaaatacaaaaaatta

SEQ ID NO: 75369 - DNA, 40 bp, Homo sapiens
taattttttgtatttttagtagaaatagggtttcaccatg

SEQ ID NO: 75370 - DNA, 40 bp, Homo sapiens
atggtgaaaccctatttctactaaaaatacaaaaaattag

SEQ ID NO: 75371 - DNA, 40 bp, Homo sapiens
ctaattttttgtatttttagtagaaatagggtttcaccat

SEQ ID NO: 75372 - DNA, 40 bp, Homo sapiens
tggtgaaaccctatttctactaaaaatacaaaaaattagc

SEQ ID NO: 75373 - DNA, 40 bp, Homo sapiens
gctaattttttgtatttttagtagaaatagggtttcacca

SEQ ID NO: 75374 - DNA, 40 bp, Homo sapiens
ggtgaaaccctatttctactaaaaatacaaaaaattagcc

SEQ ID NO: 75375 - DNA, 40 bp, Homo sapiens
ggctaattttttgtatttttagtagaaatagggtttcacc

SEQ ID NO: 75376 - DNA, 40 bp, Homo sapiens
gtgaaaccctatttctactaaaaatacaaaaaattagccg

SEQ ID NO: 75377 - DNA, 40 bp, Homo sapiens
cggctaattttttgtatttttagtagaaatagggtttcac

SEQ ID NO: 75378 - DNA, 40 bp, Homo sapiens
tgaaaccctatttctactaaaaatacaaaaaattagccgg

SEQ ID NO: 75379 - DNA, 40 bp, Homo sapiens
ccggctaattttttgtatttttagtagaaatagggtttca

SEQ ID NO: 75380 - DNA, 40 bp, Homo sapiens
gaaaccctatttctactaaaaatacaaaaaattagccggg

SEQ ID NO: 75381 - DNA, 40 bp, Homo sapiens
cccggctaattttttgtatttttagtagaaatagggtttc

SEQ ID NO: 75382 - DNA, 40 bp, Homo sapiens
aaaccctatttctactaaaaatacaaaaaattagccgggc

SEQ ID NO: 75383 - DNA, 40 bp, Homo sapiens
gcccggctaattttttgtatttttagtagaaatagggttt

SEQ ID NO: 75384 - DNA, 40 bp, Homo sapiens
aaccctatttctactaaaaatacaaaaaattagccgggcg

SEQ ID NO: 75385 - DNA, 40 bp, Homo sapiens
cgcccggctaattttttgtatttttagtagaaatagggtt

SEQ ID NO: 75386 - DNA, 40 bp, Homo sapiens
accctatttctactaaaaatacaaaaaattagccgggcgt

SEQ ID NO: 75387 - DNA, 40 bp, Homo sapiens
acgcccggctaattttttgtatttttagtagaaatagggt

SEQ ID NO: 75388 - DNA, 40 bp, Homo sapiens
ccctatttctactaaaaatacaaaaaattagccgggcgtg

SEQ ID NO: 75389 - DNA, 40 bp, Homo sapiens
cacgcccggctaattttttgtatttttagtagaaataggg

SEQ ID NO: 75390 - DNA, 40 bp, Homo sapiens
cctatttctactaaaaatacaaaaaattagccgggcgtgg

SEQ ID NO: 75391 - DNA, 40 bp, Homo sapiens
ccacgcccggctaattttttgtatttttagtagaaatagg

SEQ ID NO: 75392 - DNA, 40 bp, Homo sapiens
ctatttctactaaaaatacaaaaaattagccgggcgtggt

SEQ ID NO: 75393 - DNA, 40 bp, Homo sapiens
accacgcccggctaattttttgtatttttagtagaaatag

SEQ ID NO: 75394 - DNA, 40 bp, Homo sapiens
tatttctactaaaaatacaaaaaattagccgggcgtggtg

SEQ ID NO: 75395 - DNA, 40 bp, Homo sapiens
caccacgcccggctaattttttgtatttttagtagaaata

SEQ ID NO: 75396 - DNA, 40 bp, Homo sapiens
atttctactaaaaatacaaaaaattagccgggcgtggtgg

SEQ ID NO: 75397 - DNA, 40 bp, Homo sapiens
ccaccacgcccggctaattttttgtatttttagtagaaat

SEQ ID NO: 75398 - DNA, 40 bp, Homo sapiens
tttctactaaaaatacaaaaaattagccgggcgtggtggc

SEQ ID NO: 75399 - DNA, 40 bp, Homo sapiens
gccaccacgcccggctaattttttgtatttttagtagaaa

SEQ ID NO: 75400 - DNA, 40 bp, Homo sapiens
ttctactaaaaatacaaaaaattagccgggcgtggtggca

SEQ ID NO: 75401 - DNA, 40 bp, Homo sapiens
tgccaccacgcccggctaattttttgtatttttagtagaa

SEQ ID NO: 75402 - DNA, 40 bp, Homo sapiens
tctactaaaaatacaaaaaattagccgggcgtggtggcac

SEQ ID NO: 75403 - DNA, 40 bp, Homo sapiens
gtgccaccacgcccggctaattttttgtatttttagtaga

SEQ ID NO: 75404 - DNA, 40 bp, Homo sapiens
ctactaaaaatacaaaaaattagccgggcgtggtggcacg

SEQ ID NO: 75405 - DNA, 40 bp, Homo sapiens
cgtgccaccacgcccggctaattttttgtatttttagtag

SEQ ID NO: 75406 - DNA, 40 bp, Homo sapiens
tactaaaaatacaaaaaattagccgggcgtggtggcacgt

SEQ ID NO: 75407 - DNA, 40 bp, Homo sapiens
acgtgccaccacgcccggctaattttttgtatttttagta

SEQ ID NO: 75408 - DNA, 40 bp, Homo sapiens
actaaaaatacaaaaaattagccgggcgtggtggcacgtg

SEQ ID NO: 75409 - DNA, 40 bp, Homo sapiens
cacgtgccaccacgcccggctaattttttgtatttttagt

SEQ ID NO: 75410 - DNA, 40 bp, Homo sapiens
ctaaaaatacaaaaaattagccgggcgtggtggcacgtgc

SEQ ID NO: 75411 - DNA, 40 bp, Homo sapiens
gcacgtgccaccacgcccggctaattttttgtatttttag

SEQ ID NO: 75412 - DNA, 40 bp, Homo sapiens
taaaaatacaaaaaattagccgggcgtggtggcacgtgcc

SEQ ID NO: 75413 - DNA, 40 bp, Homo sapiens
ggcacgtgccaccacgcccggctaattttttgtattttta

SEQ ID NO: 75414 - DNA, 40 bp, Homo sapiens
aaaaatacaaaaaattagccgggcgtggtggcacgtgcct

SEQ ID NO: 75415 - DNA, 40 bp, Homo sapiens
aggcacgtgccaccacgcccggctaattttttgtattttt

SEQ ID NO: 75416 - DNA, 40 bp, Homo sapiens
aaaatacaaaaaattagccgggcgtggtggcacgtgcctg

SEQ ID NO: 75417 - DNA, 40 bp, Homo sapiens
caggcacgtgccaccacgcccggctaattttttgtatttt

SEQ ID NO: 75418 - DNA, 40 bp, Homo sapiens
aaatacaaaaaattagccgggcgtggtggcacgtgcctgt

SEQ ID NO: 75419 - DNA, 40 bp, Homo sapiens
acaggcacgtgccaccacgcccggctaattttttgtattt

SEQ ID NO: 75420 - DNA, 40 bp, Homo sapiens
aatacaaaaaattagccgggcgtggtggcacgtgcctgta

SEQ ID NO: 75421 - DNA, 40 bp, Homo sapiens
tacaggcacgtgccaccacgcccggctaattttttgtatt

SEQ ID NO: 75422 - DNA, 40 bp, Homo sapiens
atacaaaaaattagccgggcgtggtggcacgtgcctgtaa

SEQ ID NO: 75423 - DNA, 40 bp, Homo sapiens
ttacaggcacgtgccaccacgcccggctaattttttgtat

SEQ ID NO: 75424 - DNA, 40 bp, Homo sapiens
tacaaaaaattagccgggcgtggtggcacgtgcctgtaat

SEQ ID NO: 75425 - DNA, 40 bp, Homo sapiens
attacaggcacgtgccaccacgcccggctaattttttgta

SEQ ID NO: 75426 - DNA, 40 bp, Homo sapiens
acaaaaaattagccgggcgtggtggcacgtgcctgtaatc

SEQ ID NO: 75427 - DNA, 40 bp, Homo sapiens
gattacaggcacgtgccaccacgcccggctaattttttgt

SEQ ID NO: 75428 - DNA, 40 bp, Homo sapiens
caaaaaattagccgggcgtggtggcacgtgcctgtaatcc

SEQ ID NO: 75429 - DNA, 40 bp, Homo sapiens
ggattacaggcacgtgccaccacgcccggctaattttttg

SEQ ID NO: 75430 - DNA, 40 bp, Homo sapiens
aaaaaattagccgggcgtggtggcacgtgcctgtaatccc

SEQ ID NO: 75431 - DNA, 40 bp, Homo sapiens
gggattacaggcacgtgccaccacgcccggctaatttttt

SEQ ID NO: 75432 - DNA, 40 bp, Homo sapiens
aaaaattagccgggcgtggtggcacgtgcctgtaatccca

SEQ ID NO: 75433 - DNA, 40 bp, Homo sapiens
tgggattacaggcacgtgccaccacgcccggctaattttt

SEQ ID NO: 75434 - DNA, 40 bp, Homo sapiens
aaaattagccgggcgtggtggcacgtgcctgtaatcccag

SEQ ID NO: 75435 - DNA, 40 bp, Homo sapiens
ctgggattacaggcacgtgccaccacgcccggctaatttt

SEQ ID NO: 75436 - DNA, 40 bp, Homo sapiens
aaattagccgggcgtggtggcacgtgcctgtaatcccagc

SEQ ID NO: 75437 - DNA, 40 bp, Homo sapiens
gctgggattacaggcacgtgccaccacgcccggctaattt

SEQ ID NO: 75438 - DNA, 40 bp, Homo sapiens
aattagccgggcgtggtggcacgtgcctgtaatcccagct

SEQ ID NO: 75439 - DNA, 40 bp, Homo sapiens
agctgggattacaggcacgtgccaccacgcccggctaatt

SEQ ID NO: 75440 - DNA, 40 bp, Homo sapiens
attagccgggcgtggtggcacgtgcctgtaatcccagcta

SEQ ID NO: 75441 - DNA, 40 bp, Homo sapiens
tagctgggattacaggcacgtgccaccacgcccggctaat

SEQ ID NO: 75442 - DNA, 40 bp, Homo sapiens
ttagccgggcgtggtggcacgtgcctgtaatcccagctac

SEQ ID NO: 75443 - DNA, 40 bp, Homo sapiens
gtagctgggattacaggcacgtgccaccacgcccggctaa

SEQ ID NO: 75444 - DNA, 40 bp, Homo sapiens
tagccgggcgtggtggcacgtgcctgtaatcccagctact

SEQ ID NO: 75445 - DNA, 40 bp, Homo sapiens
agtagctgggattacaggcacgtgccaccacgcccggcta

SEQ ID NO: 75446 - DNA, 40 bp, Homo sapiens
agccgggcgtggtggcacgtgcctgtaatcccagctactt

SEQ ID NO: 75447 - DNA, 40 bp, Homo sapiens
aagtagctgggattacaggcacgtgccaccacgcccggct

SEQ ID NO: 75448 - DNA, 40 bp, Homo sapiens
gccgggcgtggtggcacgtgcctgtaatcccagctacttg

SEQ ID NO: 75449 - DNA, 40 bp, Homo sapiens
caagtagctgggattacaggcacgtgccaccacgcccggc

SEQ ID NO: 75450 - DNA, 40 bp, Homo sapiens
ccgggcgtggtggcacgtgcctgtaatcccagctacttgg

SEQ ID NO: 75451 - DNA, 40 bp, Homo sapiens
ccaagtagctgggattacaggcacgtgccaccacgcccgg

SEQ ID NO: 75452 - DNA, 40 bp, Homo sapiens
cgggcgtggtggcacgtgcctgtaatcccagctacttggg

SEQ ID NO: 75453 - DNA, 40 bp, Homo sapiens
cccaagtagctgggattacaggcacgtgccaccacgcccg

SEQ ID NO: 75454 - DNA, 40 bp, Homo sapiens
gggcgtggtggcacgtgcctgtaatcccagctacttggga

SEQ ID NO: 75455 - DNA, 40 bp, Homo sapiens
tcccaagtagctgggattacaggcacgtgccaccacgccc

SEQ ID NO: 75456 - DNA, 40 bp, Homo sapiens
ggcgtggtggcacgtgcctgtaatcccagctacttgggag

SEQ ID NO: 75457 - DNA, 40 bp, Homo sapiens
ctcccaagtagctgggattacaggcacgtgccaccacgcc

SEQ ID NO: 75458 - DNA, 40 bp, Homo sapiens
gcgtggtggcacgtgcctgtaatcccagctacttgggagg

SEQ ID NO: 75459 - DNA, 40 bp, Homo sapiens
cctcccaagtagctgggattacaggcacgtgccaccacgc

SEQ ID NO: 75460 - DNA, 40 bp, Homo sapiens
cgtggtggcacgtgcctgtaatcccagctacttgggaggc

SEQ ID NO: 75461 - DNA, 40 bp, Homo sapiens
gcctcccaagtagctgggattacaggcacgtgccaccacg

SEQ ID NO: 75462 - DNA, 40 bp, Homo sapiens
gtggtggcacgtgcctgtaatcccagctacttgggaggct

SEQ ID NO: 75463 - DNA, 40 bp, Homo sapiens
agcctcccaagtagctgggattacaggcacgtgccaccac

SEQ ID NO: 75464 - DNA, 40 bp, Homo sapiens
tggtggcacgtgcctgtaatcccagctacttgggaggctg

SEQ ID NO: 75465 - DNA, 40 bp, Homo sapiens
cagcctcccaagtagctgggattacaggcacgtgccacca

SEQ ID NO: 75466 - DNA, 40 bp, Homo sapiens
ggtggcacgtgcctgtaatcccagctacttgggaggctga

SEQ ID NO: 75467 - DNA, 40 bp, Homo sapiens
tcagcctcccaagtagctgggattacaggcacgtgccacc

SEQ ID NO: 75468 - DNA, 40 bp, Homo sapiens
gtggcacgtgcctgtaatcccagctacttgggaggctgag

SEQ ID NO: 75469 - DNA, 40 bp, Homo sapiens
ctcagcctcccaagtagctgggattacaggcacgtgccac

SEQ ID NO: 75470 - DNA, 40 bp, Homo sapiens
tggcacgtgcctgtaatcccagctacttgggaggctgagg

SEQ ID NO: 75471 - DNA, 40 bp, Homo sapiens
cctcagcctcccaagtagctgggattacaggcacgtgcca

SEQ ID NO: 75472 - DNA, 40 bp, Homo sapiens
ggcacgtgcctgtaatcccagctacttgggaggctgaggc

SEQ ID NO: 75473 - DNA, 40 bp, Homo sapiens
gcctcagcctcccaagtagctgggattacaggcacgtgcc

SEQ ID NO: 75474 - DNA, 40 bp, Homo sapiens
gcacgtgcctgtaatcccagctacttgggaggctgaggca

SEQ ID NO: 75475 - DNA, 40 bp, Homo sapiens
tgcctcagcctcccaagtagctgggattacaggcacgtgc

SEQ ID NO: 75476 - DNA, 40 bp, Homo sapiens
cacgtgcctgtaatcccagctacttgggaggctgaggcag

SEQ ID NO: 75477 - DNA, 40 bp, Homo sapiens
ctgcctcagcctcccaagtagctgggattacaggcacgtg

SEQ ID NO: 75478 - DNA, 40 bp, Homo sapiens
acgtgcctgtaatcccagctacttgggaggctgaggcagg

SEQ ID NO: 75479 - DNA, 40 bp, Homo sapiens
cctgcctcagcctcccaagtagctgggattacaggcacgt

SEQ ID NO: 75480 - DNA, 40 bp, Homo sapiens
cgtgcctgtaatcccagctacttgggaggctgaggcagga

SEQ ID NO: 75481 - DNA, 40 bp, Homo sapiens
tcctgcctcagcctcccaagtagctgggattacaggcacg

SEQ ID NO: 75482 - DNA, 40 bp, Homo sapiens
gtgcctgtaatcccagctacttgggaggctgaggcaggag

SEQ ID NO: 75483 - DNA, 40 bp, Homo sapiens
ctcctgcctcagcctcccaagtagctgggattacaggcac

SEQ ID NO: 75484 - DNA, 40 bp, Homo sapiens
tgcctgtaatcccagctacttgggaggctgaggcaggaga

SEQ ID NO: 75485 - DNA, 40 bp, Homo sapiens
tctcctgcctcagcctcccaagtagctgggattacaggca

SEQ ID NO: 75486 - DNA, 40 bp, Homo sapiens
gcctgtaatcccagctacttgggaggctgaggcaggagaa

SEQ ID NO: 75487 - DNA, 40 bp, Homo sapiens
ttctcctgcctcagcctcccaagtagctgggattacaggc

SEQ ID NO: 75488 - DNA, 40 bp, Homo sapiens
cctgtaatcccagctacttgggaggctgaggcaggagaat

SEQ ID NO: 75489 - DNA, 40 bp, Homo sapiens
attctcctgcctcagcctcccaagtagctgggattacagg

SEQ ID NO: 75490 - DNA, 40 bp, Homo sapiens
ctgtaatcccagctacttgggaggctgaggcaggagaatt

SEQ ID NO: 75491 - DNA, 40 bp, Homo sapiens
aattctcctgcctcagcctcccaagtagctgggattacag

SEQ ID NO: 75492 - DNA, 40 bp, Homo sapiens
tgtaatcccagctacttgggaggctgaggcaggagaattg

SEQ ID NO: 75493 - DNA, 40 bp, Homo sapiens
caattctcctgcctcagcctcccaagtagctgggattaca

SEQ ID NO: 75494 - DNA, 40 bp, Homo sapiens
gtaatcccagctacttgggaggctgaggcaggagaattgc

SEQ ID NO: 75495 - DNA, 40 bp, Homo sapiens
gcaattctcctgcctcagcctcccaagtagctgggattac

SEQ ID NO: 75496 - DNA, 40 bp, Homo sapiens
taatcccagctacttgggaggctgaggcaggagaattgct

SEQ ID NO: 75497 - DNA, 40 bp, Homo sapiens
agcaattctcctgcctcagcctcccaagtagctgggatta

SEQ ID NO: 75498 - DNA, 40 bp, Homo sapiens
aatcccagctacttgggaggctgaggcaggagaattgctt

SEQ ID NO: 75499 - DNA, 40 bp, Homo sapiens
aagcaattctcctgcctcagcctcccaagtagctgggatt

SEQ ID NO: 75500 - DNA, 40 bp, Homo sapiens
atcccagctacttgggaggctgaggcaggagaattgcttg

SEQ ID NO: 75501 - DNA, 40 bp, Homo sapiens
caagcaattctcctgcctcagcctcccaagtagctgggat

SEQ ID NO: 75502 - DNA, 40 bp, Homo sapiens
tcccagctacttgggaggctgaggcaggagaattgcttga

SEQ ID NO: 75503 - DNA, 40 bp, Homo sapiens
tcaagcaattctcctgcctcagcctcccaagtagctggga

SEQ ID NO: 75504 - DNA, 40 bp, Homo sapiens
cccagctacttgggaggctgaggcaggagaattgcttgaa

SEQ ID NO: 75505 - DNA, 40 bp, Homo sapiens
ttcaagcaattctcctgcctcagcctcccaagtagctggg

SEQ ID NO: 75506 - DNA, 40 bp, Homo sapiens
ccagctacttgggaggctgaggcaggagaattgcttgaac

SEQ ID NO: 75507 - DNA, 40 bp, Homo sapiens
gttcaagcaattctcctgcctcagcctcccaagtagctgg

SEQ ID NO: 75508 - DNA, 40 bp, Homo sapiens
cagctacttgggaggctgaggcaggagaattgcttgaacc

SEQ ID NO: 75509 - DNA, 40 bp, Homo sapiens
ggttcaagcaattctcctgcctcagcctcccaagtagctg

SEQ ID NO: 75510 - DNA, 40 bp, Homo sapiens
agctacttgggaggctgaggcaggagaattgcttgaacct

SEQ ID NO: 75511 - DNA, 40 bp, Homo sapiens
aggttcaagcaattctcctgcctcagcctcccaagtagct

SEQ ID NO: 75512 - DNA, 40 bp, Homo sapiens
gctacttgggaggctgaggcaggagaattgcttgaacctg

SEQ ID NO: 75513 - DNA, 40 bp, Homo sapiens
caggttcaagcaattctcctgcctcagcctcccaagtagc

SEQ ID NO: 75514 - DNA, 40 bp, Homo sapiens
ctacttgggaggctgaggcaggagaattgcttgaacctgg

SEQ ID NO: 75515 - DNA, 40 bp, Homo sapiens
ccaggttcaagcaattctcctgcctcagcctcccaagtag

SEQ ID NO: 75516 - DNA, 40 bp, Homo sapiens
tacttgggaggctgaggcaggagaattgcttgaacctggg

SEQ ID NO: 75517 - DNA, 40 bp, Homo sapiens
cccaggttcaagcaattctcctgcctcagcctcccaagta

SEQ ID NO: 75518 - DNA, 40 bp, Homo sapiens
acttgggaggctgaggcaggagaattgcttgaacctggga

SEQ ID NO: 75519 - DNA, 40 bp, Homo sapiens
tcccaggttcaagcaattctcctgcctcagcctcccaagt

SEQ ID NO: 75520 - DNA, 40 bp, Homo sapiens
cttgggaggctgaggcaggagaattgcttgaacctgggag

SEQ ID NO: 75521 - DNA, 40 bp, Homo sapiens
ctcccaggttcaagcaattctcctgcctcagcctcccaag

SEQ ID NO: 75522 - DNA, 40 bp, Homo sapiens
ttgggaggctgaggcaggagaattgcttgaacctgggagg

SEQ ID NO: 75523 - DNA, 40 bp, Homo sapiens
cctcccaggttcaagcaattctcctgcctcagcctcccaa

SEQ ID NO: 75524 - DNA, 40 bp, Homo sapiens
tgggaggctgaggcaggagaattgcttgaacctgggaggc

SEQ ID NO: 75525 - DNA, 40 bp, Homo sapiens
gcctcccaggttcaagcaattctcctgcctcagcctccca

SEQ ID NO: 75526 - DNA, 40 bp, Homo sapiens
gggaggctgaggcaggagaattgcttgaacctgggaggca

SEQ ID NO: 75527 - DNA, 40 bp, Homo sapiens
tgcctcccaggttcaagcaattctcctgcctcagcctccc

SEQ ID NO: 75528 - DNA, 40 bp, Homo sapiens
ggaggctgaggcaggagaattgcttgaacctgggaggcag

SEQ ID NO: 75529 - DNA, 40 bp, Homo sapiens
ctgcctcccaggttcaagcaattctcctgcctcagcctcc

SEQ ID NO: 75530 - DNA, 40 bp, Homo sapiens
gaggctgaggcaggagaattgcttgaacctgggaggcaga

SEQ ID NO: 75531 - DNA, 40 bp, Homo sapiens
tctgcctcccaggttcaagcaattctcctgcctcagcctc

SEQ ID NO: 75532 - DNA, 40 bp, Homo sapiens
aggctgaggcaggagaattgcttgaacctgggaggcagag

SEQ ID NO: 75533 - DNA, 40 bp, Homo sapiens
ctctgcctcccaggttcaagcaattctcctgcctcagcct

SEQ ID NO: 75534 - DNA, 40 bp, Homo sapiens
ggctgaggcaggagaattgcttgaacctgggaggcagagg

SEQ ID NO: 75535 - DNA, 40 bp, Homo sapiens
cctctgcctcccaggttcaagcaattctcctgcctcagcc

SEQ ID NO: 75536 - DNA, 40 bp, Homo sapiens
gctgaggcaggagaattgcttgaacctgggaggcagaggt

SEQ ID NO: 75537 - DNA, 40 bp, Homo sapiens
acctctgcctcccaggttcaagcaattctcctgcctcagc

SEQ ID NO: 75538 - DNA, 40 bp, Homo sapiens
ctgaggcaggagaattgcttgaacctgggaggcagaggtt

SEQ ID NO: 75539 - DNA, 40 bp, Homo sapiens
aacctctgcctcccaggttcaagcaattctcctgcctcag

SEQ ID NO: 75540 - DNA, 40 bp, Homo sapiens
tgaggcaggagaattgcttgaacctgggaggcagaggttg

SEQ ID NO: 75541 - DNA, 40 bp, Homo sapiens
caacctctgcctcccaggttcaagcaattctcctgcctca

SEQ ID NO: 75542 - DNA, 40 bp, Homo sapiens
gaggcaggagaattgcttgaacctgggaggcagaggttgc

SEQ ID NO: 75543 - DNA, 40 bp, Homo sapiens
gcaacctctgcctcccaggttcaagcaattctcctgcctc

SEQ ID NO: 75544 - DNA, 40 bp, Homo sapiens
aggcaggagaattgcttgaacctgggaggcagaggttgca

SEQ ID NO: 75545 - DNA, 40 bp, Homo sapiens
tgcaacctctgcctcccaggttcaagcaattctcctgcct

SEQ ID NO: 75546 - DNA, 40 bp, Homo sapiens
ggcaggagaattgcttgaacctgggaggcagaggttgcag

SEQ ID NO: 75547 - DNA, 40 bp, Homo sapiens
ctgcaacctctgcctcccaggttcaagcaattctcctgcc

SEQ ID NO: 75548 - DNA, 40 bp, Homo sapiens
gcaggagaattgcttgaacctgggaggcagaggttgcagt

SEQ ID NO: 75549 - DNA, 40 bp, Homo sapiens
actgcaacctctgcctcccaggttcaagcaattctcctgc

SEQ ID NO: 75550 - DNA, 40 bp, Homo sapiens
caggagaattgcttgaacctgggaggcagaggttgcagtg

SEQ ID NO: 75551 - DNA, 40 bp, Homo sapiens
cactgcaacctctgcctcccaggttcaagcaattctcctg

SEQ ID NO: 75552 - DNA, 40 bp, Homo sapiens
aggagaattgcttgaacctgggaggcagaggttgcagtga

SEQ ID NO: 75553 - DNA, 40 bp, Homo sapiens
tcactgcaacctctgcctcccaggttcaagcaattctcct

SEQ ID NO: 75554 - DNA, 40 bp, Homo sapiens
ggagaattgcttgaacctgggaggcagaggttgcagtgag

SEQ ID NO: 75555 - DNA, 40 bp, Homo sapiens
ctcactgcaacctctgcctcccaggttcaagcaattctcc

SEQ ID NO: 75556 - DNA, 40 bp, Homo sapiens
gagaattgcttgaacctgggaggcagaggttgcagtgagc

SEQ ID NO: 75557 - DNA, 40 bp, Homo sapiens
gctcactgcaacctctgcctcccaggttcaagcaattctc

SEQ ID NO: 75558 - DNA, 40 bp, Homo sapiens
agaattgcttgaacctgggaggcagaggttgcagtgagct

SEQ ID NO: 75559 - DNA, 40 bp, Homo sapiens
agctcactgcaacctctgcctcccaggttcaagcaattct

SEQ ID NO: 75560 - DNA, 40 bp, Homo sapiens
gaattgcttgaacctgggaggcagaggttgcagtgagctg

SEQ ID NO: 75561 - DNA, 40 bp, Homo sapiens
cagctcactgcaacctctgcctcccaggttcaagcaattc

SEQ ID NO: 75562 - DNA, 40 bp, Homo sapiens
aattgcttgaacctgggaggcagaggttgcagtgagctga

SEQ ID NO: 75563 - DNA, 40 bp, Homo sapiens
tcagctcactgcaacctctgcctcccaggttcaagcaatt

SEQ ID NO: 75564 - DNA, 40 bp, Homo sapiens
attgcttgaacctgggaggcagaggttgcagtgagctgag

SEQ ID NO: 75565 - DNA, 40 bp, Homo sapiens
ctcagctcactgcaacctctgcctcccaggttcaagcaat

SEQ ID NO: 75566 - DNA, 40 bp, Homo sapiens
ttgcttgaacctgggaggcagaggttgcagtgagctgaga

SEQ ID NO: 75567 - DNA, 40 bp, Homo sapiens
tctcagctcactgcaacctctgcctcccaggttcaagcaa

SEQ ID NO: 75568 - DNA, 40 bp, Homo sapiens
tgcttgaacctgggaggcagaggttgcagtgagctgagaa

SEQ ID NO: 75569 - DNA, 40 bp, Homo sapiens
ttctcagctcactgcaacctctgcctcccaggttcaagca

SEQ ID NO: 75570 - DNA, 40 bp, Homo sapiens
gcttgaacctgggaggcagaggttgcagtgagctgagaat

SEQ ID NO: 75571 - DNA, 40 bp, Homo sapiens
attctcagctcactgcaacctctgcctcccaggttcaagc

SEQ ID NO: 75572 - DNA, 40 bp, Homo sapiens
cttgaacctgggaggcagaggttgcagtgagctgagaatg

SEQ ID NO: 75573 - DNA, 40 bp, Homo sapiens
cattctcagctcactgcaacctctgcctcccaggttcaag

SEQ ID NO: 75574 - DNA, 40 bp, Homo sapiens
ttgaacctgggaggcagaggttgcagtgagctgagaatgc

SEQ ID NO: 75575 - DNA, 40 bp, Homo sapiens
gcattctcagctcactgcaacctctgcctcccaggttcaa

SEQ ID NO: 75576 - DNA, 40 bp, Homo sapiens
tgaacctgggaggcagaggttgcagtgagctgagaatgca

SEQ ID NO: 75577 - DNA, 40 bp, Homo sapiens
tgcattctcagctcactgcaacctctgcctcccaggttca

SEQ ID NO: 75578 - DNA, 40 bp, Homo sapiens
gaacctgggaggcagaggttgcagtgagctgagaatgcac

SEQ ID NO: 75579 - DNA, 40 bp, Homo sapiens
gtgcattctcagctcactgcaacctctgcctcccaggttc

SEQ ID NO: 75580 - DNA, 40 bp, Homo sapiens
aacctgggaggcagaggttgcagtgagctgagaatgcacc

SEQ ID NO: 75581 - DNA, 40 bp, Homo sapiens
ggtgcattctcagctcactgcaacctctgcctcccaggtt

SEQ ID NO: 75582 - DNA, 40 bp, Homo sapiens
acctgggaggcagaggttgcagtgagctgagaatgcacca

SEQ ID NO: 75583 - DNA, 40 bp, Homo sapiens
tggtgcattctcagctcactgcaacctctgcctcccaggt

SEQ ID NO: 75584 - DNA, 40 bp, Homo sapiens
cctgggaggcagaggttgcagtgagctgagaatgcaccat

SEQ ID NO: 75585 - DNA, 40 bp, Homo sapiens
atggtgcattctcagctcactgcaacctctgcctcccagg

SEQ ID NO: 75586 - DNA, 40 bp, Homo sapiens
ctgggaggcagaggttgcagtgagctgagaatgcaccatt

SEQ ID NO: 75587 - DNA, 40 bp, Homo sapiens
aatggtgcattctcagctcactgcaacctctgcctcccag

SEQ ID NO: 75588 - DNA, 40 bp, Homo sapiens
tgggaggcagaggttgcagtgagctgagaatgcaccattg

SEQ ID NO: 75589 - DNA, 40 bp, Homo sapiens
caatggtgcattctcagctcactgcaacctctgcctccca

SEQ ID NO: 75590 - DNA, 40 bp, Homo sapiens
gggaggcagaggttgcagtgagctgagaatgcaccattgc

SEQ ID NO: 75591 - DNA, 40 bp, Homo sapiens
gcaatggtgcattctcagctcactgcaacctctgcctccc

SEQ ID NO: 75592 - DNA, 40 bp, Homo sapiens
ggaggcagaggttgcagtgagctgagaatgcaccattgca

SEQ ID NO: 75593 - DNA, 40 bp, Homo sapiens
tgcaatggtgcattctcagctcactgcaacctctgcctcc

SEQ ID NO: 75594 - DNA, 40 bp, Homo sapiens
gaggcagaggttgcagtgagctgagaatgcaccattgcac

SEQ ID NO: 75595 - DNA, 40 bp, Homo sapiens
gtgcaatggtgcattctcagctcactgcaacctctgcctc

SEQ ID NO: 75596 - DNA, 40 bp, Homo sapiens
aggcagaggttgcagtgagctgagaatgcaccattgcact

SEQ ID NO: 75597 - DNA, 40 bp, Homo sapiens
agtgcaatggtgcattctcagctcactgcaacctctgcct

SEQ ID NO: 75598 - DNA, 40 bp, Homo sapiens
ggcagaggttgcagtgagctgagaatgcaccattgcactc

SEQ ID NO: 75599 - DNA, 40 bp, Homo sapiens
gagtgcaatggtgcattctcagctcactgcaacctctgcc

SEQ ID NO: 75600 - DNA, 40 bp, Homo sapiens
gcagaggttgcagtgagctgagaatgcaccattgcactcc

SEQ ID NO: 75601 - DNA, 40 bp, Homo sapiens
ggagtgcaatggtgcattctcagctcactgcaacctctgc

SEQ ID NO: 75602 - DNA, 40 bp, Homo sapiens
cagaggttgcagtgagctgagaatgcaccattgcactcca

SEQ ID NO: 75603 - DNA, 40 bp, Homo sapiens
tggagtgcaatggtgcattctcagctcactgcaacctctg

SEQ ID NO: 75604 - DNA, 40 bp, Homo sapiens
agaggttgcagtgagctgagaatgcaccattgcactccag

SEQ ID NO: 75605 - DNA, 40 bp, Homo sapiens
ctggagtgcaatggtgcattctcagctcactgcaacctct

SEQ ID NO: 75606 - DNA, 40 bp, Homo sapiens
gaggttgcagtgagctgagaatgcaccattgcactccagc

SEQ ID NO: 75607 - DNA, 40 bp, Homo sapiens
gctggagtgcaatggtgcattctcagctcactgcaacctc

SEQ ID NO: 75608 - DNA, 40 bp, Homo sapiens
aggttgcagtgagctgagaatgcaccattgcactccagct

SEQ ID NO: 75609 - DNA, 40 bp, Homo sapiens
agctggagtgcaatggtgcattctcagctcactgcaacct

SEQ ID NO: 75610 - DNA, 40 bp, Homo sapiens
ggttgcagtgagctgagaatgcaccattgcactccagctt

SEQ ID NO: 75611 - DNA, 40 bp, Homo sapiens
aagctggagtgcaatggtgcattctcagctcactgcaacc

SEQ ID NO: 75612 - DNA, 40 bp, Homo sapiens
gttgcagtgagctgagaatgcaccattgcactccagcttg

SEQ ID NO: 75613 - DNA, 40 bp, Homo sapiens
caagctggagtgcaatggtgcattctcagctcactgcaac

SEQ ID NO: 75614 - DNA, 40 bp, Homo sapiens
ttgcagtgagctgagaatgcaccattgcactccagcttga

SEQ ID NO: 75615 - DNA, 40 bp, Homo sapiens
tcaagctggagtgcaatggtgcattctcagctcactgcaa

SEQ ID NO: 75616 - DNA, 40 bp, Homo sapiens
tgcagtgagctgagaatgcaccattgcactccagcttgag

SEQ ID NO: 75617 - DNA, 40 bp, Homo sapiens
ctcaagctggagtgcaatggtgcattctcagctcactgca

SEQ ID NO: 75618 - DNA, 40 bp, Homo sapiens
gcagtgagctgagaatgcaccattgcactccagcttgagc

SEQ ID NO: 75619 - DNA, 40 bp, Homo sapiens
gctcaagctggagtgcaatggtgcattctcagctcactgc

SEQ ID NO: 75620 - DNA, 40 bp, Homo sapiens
cagtgagctgagaatgcaccattgcactccagcttgagca

SEQ ID NO: 75621 - DNA, 40 bp, Homo sapiens
tgctcaagctggagtgcaatggtgcattctcagctcactg

SEQ ID NO: 75622 - DNA, 40 bp, Homo sapiens
agtgagctgagaatgcaccattgcactccagcttgagcaa

SEQ ID NO: 75623 - DNA, 40 bp, Homo sapiens
ttgctcaagctggagtgcaatggtgcattctcagctcact

SEQ ID NO: 75624 - DNA, 40 bp, Homo sapiens
gtgagctgagaatgcaccattgcactccagcttgagcaac

SEQ ID NO: 75625 - DNA, 40 bp, Homo sapiens
gttgctcaagctggagtgcaatggtgcattctcagctcac

SEQ ID NO: 75626 - DNA, 40 bp, Homo sapiens
tgagctgagaatgcaccattgcactccagcttgagcaaca

SEQ ID NO: 75627 - DNA, 40 bp, Homo sapiens
tgttgctcaagctggagtgcaatggtgcattctcagctca

SEQ ID NO: 75628 - DNA, 40 bp, Homo sapiens
gagctgagaatgcaccattgcactccagcttgagcaacaa

SEQ ID NO: 75629 - DNA, 40 bp, Homo sapiens
ttgttgctcaagctggagtgcaatggtgcattctcagctc

SEQ ID NO: 75630 - DNA, 40 bp, Homo sapiens
agctgagaatgcaccattgcactccagcttgagcaacaag

SEQ ID NO: 75631 - DNA, 40 bp, Homo sapiens
cttgttgctcaagctggagtgcaatggtgcattctcagct

SEQ ID NO: 75632 - DNA, 40 bp, Homo sapiens
gctgagaatgcaccattgcactccagcttgagcaacaaga

SEQ ID NO: 75633 - DNA, 40 bp, Homo sapiens
tcttgttgctcaagctggagtgcaatggtgcattctcagc

SEQ ID NO: 75634 - DNA, 40 bp, Homo sapiens
ctgagaatgcaccattgcactccagcttgagcaacaagag

SEQ ID NO: 75635 - DNA, 40 bp, Homo sapiens
ctcttgttgctcaagctggagtgcaatggtgcattctcag

SEQ ID NO: 75636 - DNA, 40 bp, Homo sapiens
tgagaatgcaccattgcactccagcttgagcaacaagagc

SEQ ID NO: 75637 - DNA, 40 bp, Homo sapiens
gctcttgttgctcaagctggagtgcaatggtgcattctca

SEQ ID NO: 75638 - DNA, 40 bp, Homo sapiens
gagaatgcaccattgcactccagcttgagcaacaagagcg

SEQ ID NO: 75639 - DNA, 40 bp, Homo sapiens
cgctcttgttgctcaagctggagtgcaatggtgcattctc

SEQ ID NO: 75640 - DNA, 40 bp, Homo sapiens
agaatgcaccattgcactccagcttgagcaacaagagcga

SEQ ID NO: 75641 - DNA, 40 bp, Homo sapiens
tcgctcttgttgctcaagctggagtgcaatggtgcattct

SEQ ID NO: 75642 - DNA, 40 bp, Homo sapiens
gaatgcaccattgcactccagcttgagcaacaagagcgaa

SEQ ID NO: 75643 - DNA, 40 bp, Homo sapiens
ttcgctcttgttgctcaagctggagtgcaatggtgcattc

SEQ ID NO: 75644 - DNA, 40 bp, Homo sapiens
aatgcaccattgcactccagcttgagcaacaagagcgaaa

SEQ ID NO: 75645 - DNA, 40 bp, Homo sapiens
tttcgctcttgttgctcaagctggagtgcaatggtgcatt

SEQ ID NO: 75646 - DNA, 40 bp, Homo sapiens
atgcaccattgcactccagcttgagcaacaagagcgaaac

SEQ ID NO: 75647 - DNA, 40 bp, Homo sapiens
gtttcgctcttgttgctcaagctggagtgcaatggtgcat

SEQ ID NO: 75648 - DNA, 40 bp, Homo sapiens
tgcaccattgcactccagcttgagcaacaagagcgaaact

SEQ ID NO: 75649 - DNA, 40 bp, Homo sapiens
agtttcgctcttgttgctcaagctggagtgcaatggtgca

SEQ ID NO: 75650 - DNA, 40 bp, Homo sapiens
gcaccattgcactccagcttgagcaacaagagcgaaactc

SEQ ID NO: 75651 - DNA, 40 bp, Homo sapiens
gagtttcgctcttgttgctcaagctggagtgcaatggtgc

SEQ ID NO: 75652 - DNA, 40 bp, Homo sapiens
caccattgcactccagcttgagcaacaagagcgaaactct

SEQ ID NO: 75653 - DNA, 40 bp, Homo sapiens
agagtttcgctcttgttgctcaagctggagtgcaatggtg

SEQ ID NO: 75654 - DNA, 40 bp, Homo sapiens
accattgcactccagcttgagcaacaagagcgaaactctg

SEQ ID NO: 75655 - DNA, 40 bp, Homo sapiens
cagagtttcgctcttgttgctcaagctggagtgcaatggt

SEQ ID NO: 75656 - DNA, 40 bp, Homo sapiens
ccattgcactccagcttgagcaacaagagcgaaactctgt

SEQ ID NO: 75657 - DNA, 40 bp, Homo sapiens
acagagtttcgctcttgttgctcaagctggagtgcaatgg

SEQ ID NO: 75658 - DNA, 40 bp, Homo sapiens
cattgcactccagcttgagcaacaagagcgaaactctgtc

SEQ ID NO: 75659 - DNA, 40 bp, Homo sapiens
gacagagtttcgctcttgttgctcaagctggagtgcaatg

SEQ ID NO: 75660 - DNA, 40 bp, Homo sapiens
attgcactccagcttgagcaacaagagcgaaactctgtct

SEQ ID NO: 75661 - DNA, 40 bp, Homo sapiens
agacagagtttcgctcttgttgctcaagctggagtgcaat

SEQ ID NO: 75662 - DNA, 40 bp, Homo sapiens
ttgcactccagcttgagcaacaagagcgaaactctgtctc

SEQ ID NO: 75663 - DNA, 40 bp, Homo sapiens
gagacagagtttcgctcttgttgctcaagctggagtgcaa

SEQ ID NO: 75664 - DNA, 40 bp, Homo sapiens
tgcactccagcttgagcaacaagagcgaaactctgtctca

SEQ ID NO: 75665 - DNA, 40 bp, Homo sapiens
tgagacagagtttcgctcttgttgctcaagctggagtgca

SEQ ID NO: 75666 - DNA, 40 bp, Homo sapiens
gcactccagcttgagcaacaagagcgaaactctgtctcaa

SEQ ID NO: 75667 - DNA, 40 bp, Homo sapiens
ttgagacagagtttcgctcttgttgctcaagctggagtgc

SEQ ID NO: 75668 - DNA, 40 bp, Homo sapiens
cactccagcttgagcaacaagagcgaaactctgtctcaaa

SEQ ID NO: 75669 - DNA, 40 bp, Homo sapiens
tttgagacagagtttcgctcttgttgctcaagctggagtg

SEQ ID NO: 75670 - DNA, 40 bp, Homo sapiens
actccagcttgagcaacaagagcgaaactctgtctcaaaa

SEQ ID NO: 75671 - DNA, 40 bp, Homo sapiens
ttttgagacagagtttcgctcttgttgctcaagctggagt

SEQ ID NO: 75672 - DNA, 40 bp, Homo sapiens
ctccagcttgagcaacaagagcgaaactctgtctcaaaaa

SEQ ID NO: 75673 - DNA, 40 bp, Homo sapiens
tttttgagacagagtttcgctcttgttgctcaagctggag

SEQ ID NO: 75674 - DNA, 40 bp, Homo sapiens
tccagcttgagcaacaagagcgaaactctgtctcaaaaaa

SEQ ID NO: 75675 - DNA, 40 bp, Homo sapiens
ttttttgagacagagtttcgctcttgttgctcaagctgga

SEQ ID NO: 75676 - DNA, 40 bp, Homo sapiens
ccagcttgagcaacaagagcgaaactctgtctcaaaaaaa

SEQ ID NO: 75677 - DNA, 40 bp, Homo sapiens
tttttttgagacagagtttcgctcttgttgctcaagctgg

SEQ ID NO: 75678 - DNA, 40 bp, Homo sapiens
cagcttgagcaacaagagcgaaactctgtctcaaaaaaaa

SEQ ID NO: 75679 - DNA, 40 bp, Homo sapiens
ttttttttgagacagagtttcgctcttgttgctcaagctg

SEQ ID NO: 75680 - DNA, 40 bp, Homo sapiens
agcttgagcaacaagagcgaaactctgtctcaaaaaaaaa

SEQ ID NO: 75681 - DNA, 40 bp, Homo sapiens
tttttttttgagacagagtttcgctcttgttgctcaagct

SEQ ID NO: 75682 - DNA, 40 bp, Homo sapiens
gcttgagcaacaagagcgaaactctgtctcaaaaaaaaaa

SEQ ID NO: 75683 - DNA, 40 bp, Homo sapiens
ttttttttttgagacagagtttcgctcttgttgctcaagc

SEQ ID NO: 75684 - DNA, 40 bp, Homo sapiens
cttgagcaacaagagcgaaactctgtctcaaaaaaaaaaa

SEQ ID NO: 75685 - DNA, 40 bp, Homo sapiens
tttttttttttgagacagagtttcgctcttgttgctcaag

SEQ ID NO: 75686 - DNA, 40 bp, Homo sapiens
ttgagcaacaagagcgaaactctgtctcaaaaaaaaaaaa

SEQ ID NO: 75687 - DNA, 40 bp, Homo sapiens
ttttttttttttgagacagagtttcgctcttgttgctcaa

SEQ ID NO: 75688 - DNA, 40 bp, Homo sapiens
tgagcaacaagagcgaaactctgtctcaaaaaaaaaaaaa

SEQ ID NO: 75689 - DNA, 40 bp, Homo sapiens
tttttttttttttgagacagagtttcgctcttgttgctca

SEQ ID NO: 75690 - DNA, 40 bp, Homo sapiens
gagcaacaagagcgaaactctgtctcaaaaaaaaaaaaaa

SEQ ID NO: 75691 - DNA, 40 bp, Homo sapiens
ttttttttttttttgagacagagtttcgctcttgttgctc

SEQ ID NO: 75692 - DNA, 40 bp, Homo sapiens
agcaacaagagcgaaactctgtctcaaaaaaaaaaaaaaa

SEQ ID NO: 75693 - DNA, 40 bp, Homo sapiens
tttttttttttttttgagacagagtttcgctcttgttgct

SEQ ID NO: 75694 - DNA, 40 bp, Homo sapiens
gcaacaagagcgaaactctgtctcaaaaaaaaaaaaaaaa

SEQ ID NO: 75695 - DNA, 40 bp, Homo sapiens
ttttttttttttttttgagacagagtttcgctcttgttgc

SEQ ID NO: 75696 - DNA, 40 bp, Homo sapiens
caacaagagcgaaactctgtctcaaaaaaaaaaaaaaaaa

SEQ ID NO: 75697 - DNA, 40 bp, Homo sapiens
tttttttttttttttttgagacagagtttcgctcttgttg

SEQ ID NO: 75698 - DNA, 40 bp, Homo sapiens
aacaagagcgaaactctgtctcaaaaaaaaaaaaaaaaag

SEQ ID NO: 75699 - DNA, 40 bp, Homo sapiens
ctttttttttttttttttgagacagagtttcgctcttgtt

SEQ ID NO: 75700 - DNA, 40 bp, Homo sapiens
acaagagcgaaactctgtctcaaaaaaaaaaaaaaaaagt

SEQ ID NO: 75701 - DNA, 40 bp, Homo sapiens
actttttttttttttttttgagacagagtttcgctcttgt

SEQ ID NO: 75702 - DNA, 40 bp, Homo sapiens
caagagcgaaactctgtctcaaaaaaaaaaaaaaaaagtc

SEQ ID NO: 75703 - DNA, 40 bp, Homo sapiens
gactttttttttttttttttgagacagagtttcgctcttg

SEQ ID NO: 75704 - DNA, 40 bp, Homo sapiens
aagagcgaaactctgtctcaaaaaaaaaaaaaaaaagtca

SEQ ID NO: 75705 - DNA, 40 bp, Homo sapiens
tgactttttttttttttttttgagacagagtttcgctctt

SEQ ID NO: 75706 - DNA, 40 bp, Homo sapiens
agagcgaaactctgtctcaaaaaaaaaaaaaaaaagtcat

SEQ ID NO: 75707 - DNA, 40 bp, Homo sapiens
atgactttttttttttttttttgagacagagtttcgctct

SEQ ID NO: 75708 - DNA, 40 bp, Homo sapiens
gagcgaaactctgtctcaaaaaaaaaaaaaaaaagtcatt

SEQ ID NO: 75709 - DNA, 40 bp, Homo sapiens
aatgactttttttttttttttttgagacagagtttcgctc

SEQ ID NO: 75710 - DNA, 40 bp, Homo sapiens
agcgaaactctgtctcaaaaaaaaaaaaaaaaagtcattt

SEQ ID NO: 75711 - DNA, 40 bp, Homo sapiens
aaatgactttttttttttttttttgagacagagtttcgct

SEQ ID NO: 75712 - DNA, 40 bp, Homo sapiens
gcgaaactctgtctcaaaaaaaaaaaaaaaaagtcatttt

SEQ ID NO: 75713 - DNA, 40 bp, Homo sapiens
aaaatgactttttttttttttttttgagacagagtttcgc

SEQ ID NO: 75714 - DNA, 40 bp, Homo sapiens
cgaaactctgtctcaaaaaaaaaaaaaaaaagtcatttta

SEQ ID NO: 75715 - DNA, 40 bp, Homo sapiens
taaaatgactttttttttttttttttgagacagagtttcg

SEQ ID NO: 75716 - DNA, 40 bp, Homo sapiens
gaaactctgtctcaaaaaaaaaaaaaaaaagtcattttag

SEQ ID NO: 75717 - DNA, 40 bp, Homo sapiens
ctaaaatgactttttttttttttttttgagacagagtttc

SEQ ID NO: 75718 - DNA, 40 bp, Homo sapiens
aaactctgtctcaaaaaaaaaaaaaaaaagtcattttagc

SEQ ID NO: 75719 - DNA, 40 bp, Homo sapiens
gctaaaatgactttttttttttttttttgagacagagttt

SEQ ID NO: 75720 - DNA, 40 bp, Homo sapiens
aactctgtctcaaaaaaaaaaaaaaaaagtcattttagct

SEQ ID NO: 75721 - DNA, 40 bp, Homo sapiens
agctaaaatgactttttttttttttttttgagacagagtt

SEQ ID NO: 75722 - DNA, 40 bp, Homo sapiens
actctgtctcaaaaaaaaaaaaaaaaagtcattttagcta

SEQ ID NO: 75723 - DNA, 40 bp, Homo sapiens
tagctaaaatgactttttttttttttttttgagacagagt

SEQ ID NO: 75724 - DNA, 40 bp, Homo sapiens
ctctgtctcaaaaaaaaaaaaaaaaagtcattttagctat

SEQ ID NO: 75725 - DNA, 40 bp, Homo sapiens
atagctaaaatgactttttttttttttttttgagacagag

SEQ ID NO: 75726 - DNA, 40 bp, Homo sapiens
tctgtctcaaaaaaaaaaaaaaaaagtcattttagctata

SEQ ID NO: 75727 - DNA, 40 bp, Homo sapiens
tatagctaaaatgactttttttttttttttttgagacaga

SEQ ID NO: 75728 - DNA, 40 bp, Homo sapiens
ctgtctcaaaaaaaaaaaaaaaaagtcattttagctatag

SEQ ID NO: 75729 - DNA, 40 bp, Homo sapiens
ctatagctaaaatgactttttttttttttttttgagacag

SEQ ID NO: 75730 - DNA, 40 bp, Homo sapiens
tgtctcaaaaaaaaaaaaaaaaagtcattttagctataga

SEQ ID NO: 75731 - DNA, 40 bp, Homo sapiens
tctatagctaaaatgactttttttttttttttttgagaca

SEQ ID NO: 75732 - DNA, 40 bp, Homo sapiens
gtctcaaaaaaaaaaaaaaaaagtcattttagctatagaa

SEQ ID NO: 75733 - DNA, 40 bp, Homo sapiens
ttctatagctaaaatgactttttttttttttttttgagac

SEQ ID NO: 75734 - DNA, 40 bp, Homo sapiens
tctcaaaaaaaaaaaaaaaaagtcattttagctatagaat

SEQ ID NO: 75735 - DNA, 40 bp, Homo sapiens
attctatagctaaaatgactttttttttttttttttgaga

SEQ ID NO: 75736 - DNA, 40 bp, Homo sapiens
ctcaaaaaaaaaaaaaaaaagtcattttagctatagaata

SEQ ID NO: 75737 - DNA, 40 bp, Homo sapiens
tattctatagctaaaatgactttttttttttttttttgag

SEQ ID NO: 75738 - DNA, 40 bp, Homo sapiens
tcaaaaaaaaaaaaaaaaagtcattttagctatagaataa

SEQ ID NO: 75739 - DNA, 40 bp, Homo sapiens
ttattctatagctaaaatgactttttttttttttttttga

SEQ ID NO: 75740 - DNA, 40 bp, Homo sapiens
caaaaaaaaaaaaaaaaagtcattttagctatagaataaa

SEQ ID NO: 75741 - DNA, 40 bp, Homo sapiens
tttattctatagctaaaatgactttttttttttttttttg

SEQ ID NO: 75742 - DNA, 40 bp, Homo sapiens
aaaaaaaaaaaaaaaaagtcattttagctatagaataaaa

SEQ ID NO: 75743 - DNA, 40 bp, Homo sapiens
ttttattctatagctaaaatgacttttttttttttttttt

SEQ ID NO: 75744 - DNA, 40 bp, Homo sapiens
aaaaaaaaaaaaaaaagtcattttagctatagaataaaat

SEQ ID NO: 75745 - DNA, 40 bp, Homo sapiens
attttattctatagctaaaatgactttttttttttttttt

SEQ ID NO: 75746 - DNA, 40 bp, Homo sapiens
aaaaaaaaaaaaaaagtcattttagctatagaataaaatc

SEQ ID NO: 75747 - DNA, 40 bp, Homo sapiens
gattttattctatagctaaaatgacttttttttttttttt

SEQ ID NO: 75748 - DNA, 40 bp, Homo sapiens
aaaaaaaaaaaaaagtcattttagctatagaataaaatct

SEQ ID NO: 75749 - DNA, 40 bp, Homo sapiens
agattttattctatagctaaaatgactttttttttttttt

SEQ ID NO: 75750 - DNA, 40 bp, Homo sapiens
aaaaaaaaaaaaagtcattttagctatagaataaaatctc

SEQ ID NO: 75751 - DNA, 40 bp, Homo sapiens
gagattttattctatagctaaaatgacttttttttttttt

SEQ ID NO: 75752 - DNA, 40 bp, Homo sapiens
aaaaaaaaaaaagtcattttagctatagaataaaatctca

SEQ ID NO: 75753 - DNA, 40 bp, Homo sapiens
tgagattttattctatagctaaaatgactttttttttttt

SEQ ID NO: 75754 - DNA, 40 bp, Homo sapiens
aaaaaaaaaaagtcattttagctatagaataaaatctcat

SEQ ID NO: 75755 - DNA, 40 bp, Homo sapiens
atgagattttattctatagctaaaatgacttttttttttt

SEQ ID NO: 75756 - DNA, 40 bp, Homo sapiens
aaaaaaaaaagtcattttagctatagaataaaatctcatg

SEQ ID NO: 75757 - DNA, 40 bp, Homo sapiens
catgagattttattctatagctaaaatgactttttttttt

SEQ ID NO: 75758 - DNA, 40 bp, Homo sapiens
aaaaaaaaagtcattttagctatagaataaaatctcatgt

SEQ ID NO: 75759 - DNA, 40 bp, Homo sapiens
acatgagattttattctatagctaaaatgacttttttttt

SEQ ID NO: 75760 - DNA, 40 bp, Homo sapiens
aaaaaaaagtcattttagctatagaataaaatctcatgtt

SEQ ID NO: 75761 - DNA, 40 bp, Homo sapiens
aacatgagattttattctatagctaaaatgactttttttt

SEQ ID NO: 75762 - DNA, 40 bp, Homo sapiens
aaaaaaagtcattttagctatagaataaaatctcatgttc

SEQ ID NO: 75763 - DNA, 40 bp, Homo sapiens
gaacatgagattttattctatagctaaaatgacttttttt

SEQ ID NO: 75764 - DNA, 40 bp, Homo sapiens
aaaaaagtcattttagctatagaataaaatctcatgttcc

SEQ ID NO: 75765 - DNA, 40 bp, Homo sapiens
ggaacatgagattttattctatagctaaaatgactttttt

SEQ ID NO: 75766 - DNA, 40 bp, Homo sapiens
aaaaagtcattttagctatagaataaaatctcatgttcca

SEQ ID NO: 75767 - DNA, 40 bp, Homo sapiens
tggaacatgagattttattctatagctaaaatgacttttt

SEQ ID NO: 75768 - DNA, 40 bp, Homo sapiens
aaaagtcattttagctatagaataaaatctcatgttccac

SEQ ID NO: 75769 - DNA, 40 bp, Homo sapiens
gtggaacatgagattttattctatagctaaaatgactttt

SEQ ID NO: 75770 - DNA, 40 bp, Homo sapiens
aaagtcattttagctatagaataaaatctcatgttccaca

SEQ ID NO: 75771 - DNA, 40 bp, Homo sapiens
tgtggaacatgagattttattctatagctaaaatgacttt

SEQ ID NO: 75772 - DNA, 40 bp, Homo sapiens
aagtcattttagctatagaataaaatctcatgttccacat

SEQ ID NO: 75773 - DNA, 40 bp, Homo sapiens
atgtggaacatgagattttattctatagctaaaatgactt

SEQ ID NO: 75774 - DNA, 40 bp, Homo sapiens
agtcattttagctatagaataaaatctcatgttccacatg

SEQ ID NO: 75775 - DNA, 40 bp, Homo sapiens
catgtggaacatgagattttattctatagctaaaatgact

SEQ ID NO: 75776 - DNA, 40 bp, Homo sapiens
gtcattttagctatagaataaaatctcatgttccacatgt

SEQ ID NO: 75777 - DNA, 40 bp, Homo sapiens
acatgtggaacatgagattttattctatagctaaaatgac

SEQ ID NO: 75778 - DNA, 40 bp, Homo sapiens
tcattttagctatagaataaaatctcatgttccacatgtg

SEQ ID NO: 75779 - DNA, 40 bp, Homo sapiens
cacatgtggaacatgagattttattctatagctaaaatga

SEQ ID NO: 75780 - DNA, 40 bp, Homo sapiens
cattttagctatagaataaaatctcatgttccacatgtgt

SEQ ID NO: 75781 - DNA, 40 bp, Homo sapiens
acacatgtggaacatgagattttattctatagctaaaatg

SEQ ID NO: 75782 - DNA, 40 bp, Homo sapiens
attttagctatagaataaaatctcatgttccacatgtgtt

SEQ ID NO: 75783 - DNA, 40 bp, Homo sapiens
aacacatgtggaacatgagattttattctatagctaaaat

SEQ ID NO: 75784 - DNA, 40 bp, Homo sapiens
ttttagctatagaataaaatctcatgttccacatgtgttg

SEQ ID NO: 75785 - DNA, 40 bp, Homo sapiens
caacacatgtggaacatgagattttattctatagctaaaa

SEQ ID NO: 75786 - DNA, 40 bp, Homo sapiens
tttagctatagaataaaatctcatgttccacatgtgttgc

SEQ ID NO: 75787 - DNA, 40 bp, Homo sapiens
gcaacacatgtggaacatgagattttattctatagctaaa

SEQ ID NO: 75788 - DNA, 40 bp, Homo sapiens
ttagctatagaataaaatctcatgttccacatgtgttgca

SEQ ID NO: 75789 - DNA, 40 bp, Homo sapiens
tgcaacacatgtggaacatgagattttattctatagctaa

SEQ ID NO: 75790 - DNA, 40 bp, Homo sapiens
tagctatagaataaaatctcatgttccacatgtgttgcag

SEQ ID NO: 75791 - DNA, 40 bp, Homo sapiens
ctgcaacacatgtggaacatgagattttattctatagcta

SEQ ID NO: 75792 - DNA, 40 bp, Homo sapiens
agctatagaataaaatctcatgttccacatgtgttgcaga

SEQ ID NO: 75793 - DNA, 40 bp, Homo sapiens
tctgcaacacatgtggaacatgagattttattctatagct

SEQ ID NO: 75794 - DNA, 40 bp, Homo sapiens
gctatagaataaaatctcatgttccacatgtgttgcagat

SEQ ID NO: 75795 - DNA, 40 bp, Homo sapiens
atctgcaacacatgtggaacatgagattttattctatagc

SEQ ID NO: 75796 - DNA, 40 bp, Homo sapiens
ctatagaataaaatctcatgttccacatgtgttgcagata

SEQ ID NO: 75797 - DNA, 40 bp, Homo sapiens
tatctgcaacacatgtggaacatgagattttattctatag

SEQ ID NO: 75798 - DNA, 40 bp, Homo sapiens
tatagaataaaatctcatgttccacatgtgttgcagatag

SEQ ID NO: 75799 - DNA, 40 bp, Homo sapiens
ctatctgcaacacatgtggaacatgagattttattctata

SEQ ID NO: 75800 - DNA, 40 bp, Homo sapiens
atagaataaaatctcatgttccacatgtgttgcagatagt

SEQ ID NO: 75801 - DNA, 40 bp, Homo sapiens
actatctgcaacacatgtggaacatgagattttattctat

SEQ ID NO: 75802 - DNA, 40 bp, Homo sapiens
tagaataaaatctcatgttccacatgtgttgcagatagtc

SEQ ID NO: 75803 - DNA, 40 bp, Homo sapiens
gactatctgcaacacatgtggaacatgagattttattcta

SEQ ID NO: 75804 - DNA, 40 bp, Homo sapiens
agaataaaatctcatgttccacatgtgttgcagatagtcc

SEQ ID NO: 75805 - DNA, 40 bp, Homo sapiens
ggactatctgcaacacatgtggaacatgagattttattct

SEQ ID NO: 75806 - DNA, 40 bp, Homo sapiens
gaataaaatctcatgttccacatgtgttgcagatagtcct

SEQ ID NO: 75807 - DNA, 40 bp, Homo sapiens
aggactatctgcaacacatgtggaacatgagattttattc

SEQ ID NO: 75808 - DNA, 40 bp, Homo sapiens
aataaaatctcatgttccacatgtgttgcagatagtcctt

SEQ ID NO: 75809 - DNA, 40 bp, Homo sapiens
aaggactatctgcaacacatgtggaacatgagattttatt

SEQ ID NO: 75810 - DNA, 40 bp, Homo sapiens
ataaaatctcatgttccacatgtgttgcagatagtcctta

SEQ ID NO: 75811 - DNA, 40 bp, Homo sapiens
taaggactatctgcaacacatgtggaacatgagattttat

SEQ ID NO: 75812 - DNA, 40 bp, Homo sapiens
taaaatctcatgttccacatgtgttgcagatagtccttac

SEQ ID NO: 75813 - DNA, 40 bp, Homo sapiens
gtaaggactatctgcaacacatgtggaacatgagatttta

SEQ ID NO: 75814 - DNA, 40 bp, Homo sapiens
aaaatctcatgttccacatgtgttgcagatagtccttact

SEQ ID NO: 75815 - DNA, 40 bp, Homo sapiens
agtaaggactatctgcaacacatgtggaacatgagatttt

SEQ ID NO: 75816 - DNA, 40 bp, Homo sapiens
aaatctcatgttccacatgtgttgcagatagtccttacta

SEQ ID NO: 75817 - DNA, 40 bp, Homo sapiens
tagtaaggactatctgcaacacatgtggaacatgagattt

SEQ ID NO: 75818 - DNA, 40 bp, Homo sapiens
aatctcatgttccacatgtgttgcagatagtccttactac

SEQ ID NO: 75819 - DNA, 40 bp, Homo sapiens
gtagtaaggactatctgcaacacatgtggaacatgagatt

SEQ ID NO: 75820 - DNA, 40 bp, Homo sapiens
atctcatgttccacatgtgttgcagatagtccttactacc

SEQ ID NO: 75821 - DNA, 40 bp, Homo sapiens
ggtagtaaggactatctgcaacacatgtggaacatgagat

SEQ ID NO: 75822 - DNA, 40 bp, Homo sapiens
tctcatgttccacatgtgttgcagatagtccttactacct

SEQ ID NO: 75823 - DNA, 40 bp, Homo sapiens
aggtagtaaggactatctgcaacacatgtggaacatgaga

SEQ ID NO: 75824 - DNA, 40 bp, Homo sapiens
ctcatgttccacatgtgttgcagatagtccttactacctt

SEQ ID NO: 75825 - DNA, 40 bp, Homo sapiens
aaggtagtaaggactatctgcaacacatgtggaacatgag

SEQ ID NO: 75826 - DNA, 40 bp, Homo sapiens
tcatgttccacatgtgttgcagatagtccttactaccttc

SEQ ID NO: 75827 - DNA, 40 bp, Homo sapiens
gaaggtagtaaggactatctgcaacacatgtggaacatga

SEQ ID NO: 75828 - DNA, 40 bp, Homo sapiens
catgttccacatgtgttgcagatagtccttactaccttcc

SEQ ID NO: 75829 - DNA, 40 bp, Homo sapiens
ggaaggtagtaaggactatctgcaacacatgtggaacatg

SEQ ID NO: 75830 - DNA, 40 bp, Homo sapiens
atgttccacatgtgttgcagatagtccttactaccttccc

SEQ ID NO: 75831 - DNA, 40 bp, Homo sapiens
gggaaggtagtaaggactatctgcaacacatgtggaacat

SEQ ID NO: 75832 - DNA, 40 bp, Homo sapiens
tgttccacatgtgttgcagatagtccttactaccttccca

SEQ ID NO: 75833 - DNA, 40 bp, Homo sapiens
tgggaaggtagtaaggactatctgcaacacatgtggaaca

SEQ ID NO: 75834 - DNA, 40 bp, Homo sapiens
gttccacatgtgttgcagatagtccttactaccttcccac

SEQ ID NO: 75835 - DNA, 40 bp, Homo sapiens
gtgggaaggtagtaaggactatctgcaacacatgtggaac

SEQ ID NO: 75836 - DNA, 40 bp, Homo sapiens
ttccacatgtgttgcagatagtccttactaccttcccacc

SEQ ID NO: 75837 - DNA, 40 bp, Homo sapiens
ggtgggaaggtagtaaggactatctgcaacacatgtggaa

SEQ ID NO: 75838 - DNA, 40 bp, Homo sapiens
tccacatgtgttgcagatagtccttactaccttcccacca

SEQ ID NO: 75839 - DNA, 40 bp, Homo sapiens
tggtgggaaggtagtaaggactatctgcaacacatgtgga

SEQ ID NO: 75840 - DNA, 40 bp, Homo sapiens
ccacatgtgttgcagatagtccttactaccttcccaccac

SEQ ID NO: 75841 - DNA, 40 bp, Homo sapiens
gtggtgggaaggtagtaaggactatctgcaacacatgtgg

SEQ ID NO: 75842 - DNA, 40 bp, Homo sapiens
cacatgtgttgcagatagtccttactaccttcccaccact

SEQ ID NO: 75843 - DNA, 40 bp, Homo sapiens
agtggtgggaaggtagtaaggactatctgcaacacatgtg

SEQ ID NO: 75844 - DNA, 40 bp, Homo sapiens
acatgtgttgcagatagtccttactaccttcccaccactc

SEQ ID NO: 75845 - DNA, 40 bp, Homo sapiens
gagtggtgggaaggtagtaaggactatctgcaacacatgt

SEQ ID NO: 75846 - DNA, 40 bp, Homo sapiens
catgtgttgcagatagtccttactaccttcccaccactcc

SEQ ID NO: 75847 - DNA, 40 bp, Homo sapiens
ggagtggtgggaaggtagtaaggactatctgcaacacatg

SEQ ID NO: 75848 - DNA, 40 bp, Homo sapiens
atgtgttgcagatagtccttactaccttcccaccactcca

SEQ ID NO: 75849 - DNA, 40 bp, Homo sapiens
tggagtggtgggaaggtagtaaggactatctgcaacacat

SEQ ID NO: 75850 - DNA, 40 bp, Homo sapiens
tgtgttgcagatagtccttactaccttcccaccactccag

SEQ ID NO: 75851 - DNA, 40 bp, Homo sapiens
ctggagtggtgggaaggtagtaaggactatctgcaacaca

SEQ ID NO: 75852 - DNA, 40 bp, Homo sapiens
gtgttgcagatagtccttactaccttcccaccactccagc

SEQ ID NO: 75853 - DNA, 40 bp, Homo sapiens
gctggagtggtgggaaggtagtaaggactatctgcaacac

SEQ ID NO: 75854 - DNA, 40 bp, Homo sapiens
tgttgcagatagtccttactaccttcccaccactccagct

SEQ ID NO: 75855 - DNA, 40 bp, Homo sapiens
agctggagtggtgggaaggtagtaaggactatctgcaaca

SEQ ID NO: 75856 - DNA, 40 bp, Homo sapiens
gttgcagatagtccttactaccttcccaccactccagctc

SEQ ID NO: 75857 - DNA, 40 bp, Homo sapiens
gagctggagtggtgggaaggtagtaaggactatctgcaac

SEQ ID NO: 75858 - DNA, 40 bp, Homo sapiens
ttgcagatagtccttactaccttcccaccactccagctct

SEQ ID NO: 75859 - DNA, 40 bp, Homo sapiens
agagctggagtggtgggaaggtagtaaggactatctgcaa

SEQ ID NO: 75860 - DNA, 40 bp, Homo sapiens
tgcagatagtccttactaccttcccaccactccagctctt

SEQ ID NO: 75861 - DNA, 40 bp, Homo sapiens
aagagctggagtggtgggaaggtagtaaggactatctgca

SEQ ID NO: 75862 - DNA, 40 bp, Homo sapiens
gcagatagtccttactaccttcccaccactccagctcttt

SEQ ID NO: 75863 - DNA, 40 bp, Homo sapiens
aaagagctggagtggtgggaaggtagtaaggactatctgc

SEQ ID NO: 75864 - DNA, 40 bp, Homo sapiens
cagatagtccttactaccttcccaccactccagctctttt

SEQ ID NO: 75865 - DNA, 40 bp, Homo sapiens
aaaagagctggagtggtgggaaggtagtaaggactatctg

SEQ ID NO: 75866 - DNA, 40 bp, Homo sapiens
agatagtccttactaccttcccaccactccagctcttttt

SEQ ID NO: 75867 - DNA, 40 bp, Homo sapiens
aaaaagagctggagtggtgggaaggtagtaaggactatct

SEQ ID NO: 75868 - DNA, 40 bp, Homo sapiens
gatagtccttactaccttcccaccactccagctctttttt

SEQ ID NO: 75869 - DNA, 40 bp, Homo sapiens
aaaaaagagctggagtggtgggaaggtagtaaggactatc

SEQ ID NO: 75870 - DNA, 40 bp, Homo sapiens
atagtccttactaccttcccaccactccagctcttttttg

SEQ ID NO: 75871 - DNA, 40 bp, Homo sapiens
caaaaaagagctggagtggtgggaaggtagtaaggactat

SEQ ID NO: 75872 - DNA, 40 bp, Homo sapiens
tagtccttactaccttcccaccactccagctcttttttgg

SEQ ID NO: 75873 - DNA, 40 bp, Homo sapiens
ccaaaaaagagctggagtggtgggaaggtagtaaggacta

SEQ ID NO: 75874 - DNA, 40 bp, Homo sapiens
agtccttactaccttcccaccactccagctcttttttggt

SEQ ID NO: 75875 - DNA, 40 bp, Homo sapiens
accaaaaaagagctggagtggtgggaaggtagtaaggact

SEQ ID NO: 75876 - DNA, 40 bp, Homo sapiens
gtccttactaccttcccaccactccagctcttttttggtc

SEQ ID NO: 75877 - DNA, 40 bp, Homo sapiens
gaccaaaaaagagctggagtggtgggaaggtagtaaggac

SEQ ID NO: 75878 - DNA, 40 bp, Homo sapiens
tccttactaccttcccaccactccagctcttttttggtct

SEQ ID NO: 75879 - DNA, 40 bp, Homo sapiens
agaccaaaaaagagctggagtggtgggaaggtagtaagga

SEQ ID NO: 75880 - DNA, 40 bp, Homo sapiens
ccttactaccttcccaccactccagctcttttttggtctt

SEQ ID NO: 75881 - DNA, 40 bp, Homo sapiens
aagaccaaaaaagagctggagtggtgggaaggtagtaagg

SEQ ID NO: 75882 - DNA, 40 bp, Homo sapiens
cttactaccttcccaccactccagctcttttttggtctta

SEQ ID NO: 75883 - DNA, 40 bp, Homo sapiens
taagaccaaaaaagagctggagtggtgggaaggtagtaag

SEQ ID NO: 75884 - DNA, 40 bp, Homo sapiens
ttactaccttcccaccactccagctcttttttggtcttat

SEQ ID NO: 75885 - DNA, 40 bp, Homo sapiens
ataagaccaaaaaagagctggagtggtgggaaggtagtaa

SEQ ID NO: 75886 - DNA, 40 bp, Homo sapiens
tactaccttcccaccactccagctcttttttggtcttata

SEQ ID NO: 75887 - DNA, 40 bp, Homo sapiens
tataagaccaaaaaagagctggagtggtgggaaggtagta

SEQ ID NO: 75888 - DNA, 40 bp, Homo sapiens
actaccttcccaccactccagctcttttttggtcttatat

SEQ ID NO: 75889 - DNA, 40 bp, Homo sapiens
atataagaccaaaaaagagctggagtggtgggaaggtagt

SEQ ID NO: 75890 - DNA, 40 bp, Homo sapiens
ctaccttcccaccactccagctcttttttggtcttatatc

SEQ ID NO: 75891 - DNA, 40 bp, Homo sapiens
gatataagaccaaaaaagagctggagtggtgggaaggtag

SEQ ID NO: 75892 - DNA, 40 bp, Homo sapiens
taccttcccaccactccagctcttttttggtcttatatct

SEQ ID NO: 75893 - DNA, 40 bp, Homo sapiens
agatataagaccaaaaaagagctggagtggtgggaaggta

SEQ ID NO: 75894 - DNA, 40 bp, Homo sapiens
accttcccaccactccagctcttttttggtcttatatcta

SEQ ID NO: 75895 - DNA, 40 bp, Homo sapiens
tagatataagaccaaaaaagagctggagtggtgggaaggt

SEQ ID NO: 75896 - DNA, 40 bp, Homo sapiens
ccttcccaccactccagctcttttttggtcttatatctaa

SEQ ID NO: 75897 - DNA, 40 bp, Homo sapiens
ttagatataagaccaaaaaagagctggagtggtgggaagg

SEQ ID NO: 75898 - DNA, 40 bp, Homo sapiens
cttcccaccactccagctcttttttggtcttatatctaaa

SEQ ID NO: 75899 - DNA, 40 bp, Homo sapiens
tttagatataagaccaaaaaagagctggagtggtgggaag

SEQ ID NO: 75900 - DNA, 40 bp, Homo sapiens
ttcccaccactccagctcttttttggtcttatatctaaaa

SEQ ID NO: 75901 - DNA, 40 bp, Homo sapiens
ttttagatataagaccaaaaaagagctggagtggtgggaa

SEQ ID NO: 75902 - DNA, 40 bp, Homo sapiens
tcccaccactccagctcttttttggtcttatatctaaaaa

SEQ ID NO: 75903 - DNA, 40 bp, Homo sapiens
tttttagatataagaccaaaaaagagctggagtggtggga

SEQ ID NO: 75904 - DNA, 40 bp, Homo sapiens
cccaccactccagctcttttttggtcttatatctaaaaac

SEQ ID NO: 75905 - DNA, 40 bp, Homo sapiens
gtttttagatataagaccaaaaaagagctggagtggtggg

SEQ ID NO: 75906 - DNA, 40 bp, Homo sapiens
ccaccactccagctcttttttggtcttatatctaaaaacg

SEQ ID NO: 75907 - DNA, 40 bp, Homo sapiens
cgtttttagatataagaccaaaaaagagctggagtggtgg

SEQ ID NO: 75908 - DNA, 40 bp, Homo sapiens
caccactccagctcttttttggtcttatatctaaaaacgt

SEQ ID NO: 75909 - DNA, 40 bp, Homo sapiens
acgtttttagatataagaccaaaaaagagctggagtggtg

SEQ ID NO: 75910 - DNA, 40 bp, Homo sapiens
accactccagctcttttttggtcttatatctaaaaacgtc

SEQ ID NO: 75911 - DNA, 40 bp, Homo sapiens
gacgtttttagatataagaccaaaaaagagctggagtggt

SEQ ID NO: 75912 - DNA, 40 bp, Homo sapiens
ccactccagctcttttttggtcttatatctaaaaacgtca

SEQ ID NO: 75913 - DNA, 40 bp, Homo sapiens
tgacgtttttagatataagaccaaaaaagagctggagtgg

SEQ ID NO: 75914 - DNA, 40 bp, Homo sapiens
cactccagctcttttttggtcttatatctaaaaacgtcat

SEQ ID NO: 75915 - DNA, 40 bp, Homo sapiens
atgacgtttttagatataagaccaaaaaagagctggagtg

SEQ ID NO: 75916 - DNA, 40 bp, Homo sapiens
actccagctcttttttggtcttatatctaaaaacgtcatc

SEQ ID NO: 75917 - DNA, 40 bp, Homo sapiens
gatgacgtttttagatataagaccaaaaaagagctggagt

SEQ ID NO: 75918 - DNA, 40 bp, Homo sapiens
ctccagctcttttttggtcttatatctaaaaacgtcatct

SEQ ID NO: 75919 - DNA, 40 bp, Homo sapiens
agatgacgtttttagatataagaccaaaaaagagctggag

SEQ ID NO: 75920 - DNA, 40 bp, Homo sapiens
tccagctcttttttggtcttatatctaaaaacgtcatctt

SEQ ID NO: 75921 - DNA, 40 bp, Homo sapiens
aagatgacgtttttagatataagaccaaaaaagagctgga

SEQ ID NO: 75922 - DNA, 40 bp, Homo sapiens
ccagctcttttttggtcttatatctaaaaacgtcatcttg

SEQ ID NO: 75923 - DNA, 40 bp, Homo sapiens
caagatgacgtttttagatataagaccaaaaaagagctgg

SEQ ID NO: 75924 - DNA, 40 bp, Homo sapiens
cagctcttttttggtcttatatctaaaaacgtcatcttgc

SEQ ID NO: 75925 - DNA, 40 bp, Homo sapiens
gcaagatgacgtttttagatataagaccaaaaaagagctg

SEQ ID NO: 75926 - DNA, 40 bp, Homo sapiens
agctcttttttggtcttatatctaaaaacgtcatcttgcc

SEQ ID NO: 75927 - DNA, 40 bp, Homo sapiens
ggcaagatgacgtttttagatataagaccaaaaaagagct

SEQ ID NO: 75928 - DNA, 40 bp, Homo sapiens
gctcttttttggtcttatatctaaaaacgtcatcttgcct

SEQ ID NO: 75929 - DNA, 40 bp, Homo sapiens
aggcaagatgacgtttttagatataagaccaaaaaagagc

SEQ ID NO: 75930 - DNA, 40 bp, Homo sapiens
ctcttttttggtcttatatctaaaaacgtcatcttgcctg

SEQ ID NO: 75931 - DNA, 40 bp, Homo sapiens
caggcaagatgacgtttttagatataagaccaaaaaagag

SEQ ID NO: 75932 - DNA, 40 bp, Homo sapiens
tcttttttggtcttatatctaaaaacgtcatcttgcctga

SEQ ID NO: 75933 - DNA, 40 bp, Homo sapiens
tcaggcaagatgacgtttttagatataagaccaaaaaaga

SEQ ID NO: 75934 - DNA, 40 bp, Homo sapiens
cttttttggtcttatatctaaaaacgtcatcttgcctgaa

SEQ ID NO: 75935 - DNA, 40 bp, Homo sapiens
ttcaggcaagatgacgtttttagatataagaccaaaaaag

SEQ ID NO: 75936 - DNA, 40 bp, Homo sapiens
ttttttggtcttatatctaaaaacgtcatcttgcctgaat

SEQ ID NO: 75937 - DNA, 40 bp, Homo sapiens
attcaggcaagatgacgtttttagatataagaccaaaaaa

SEQ ID NO: 75938 - DNA, 40 bp, Homo sapiens
tttttggtcttatatctaaaaacgtcatcttgcctgaatt

SEQ ID NO: 75939 - DNA, 40 bp, Homo sapiens
aattcaggcaagatgacgtttttagatataagaccaaaaa

SEQ ID NO: 75940 - DNA, 40 bp, Homo sapiens
ttttggtcttatatctaaaaacgtcatcttgcctgaattt

SEQ ID NO: 75941 - DNA, 40 bp, Homo sapiens
aaattcaggcaagatgacgtttttagatataagaccaaaa

SEQ ID NO: 75942 - DNA, 40 bp, Homo sapiens
tttggtcttatatctaaaaacgtcatcttgcctgaatttc

SEQ ID NO: 75943 - DNA, 40 bp, Homo sapiens
gaaattcaggcaagatgacgtttttagatataagaccaaa

SEQ ID NO: 75944 - DNA, 40 bp, Homo sapiens
ttggtcttatatctaaaaacgtcatcttgcctgaatttct

SEQ ID NO: 75945 - DNA, 40 bp, Homo sapiens
agaaattcaggcaagatgacgtttttagatataagaccaa

SEQ ID NO: 75946 - DNA, 40 bp, Homo sapiens
tggtcttatatctaaaaacgtcatcttgcctgaatttctt

SEQ ID NO: 75947 - DNA, 40 bp, Homo sapiens
aagaaattcaggcaagatgacgtttttagatataagacca

SEQ ID NO: 75948 - DNA, 40 bp, Homo sapiens
ggtcttatatctaaaaacgtcatcttgcctgaatttcttt

SEQ ID NO: 75949 - DNA, 40 bp, Homo sapiens
aaagaaattcaggcaagatgacgtttttagatataagacc

SEQ ID NO: 75950 - DNA, 40 bp, Homo sapiens
gtcttatatctaaaaacgtcatcttgcctgaatttctttt

SEQ ID NO: 75951 - DNA, 40 bp, Homo sapiens
aaaagaaattcaggcaagatgacgtttttagatataagac

SEQ ID NO: 75952 - DNA, 40 bp, Homo sapiens
tcttatatctaaaaacgtcatcttgcctgaatttcttttg

SEQ ID NO: 75953 - DNA, 40 bp, Homo sapiens
caaaagaaattcaggcaagatgacgtttttagatataaga

SEQ ID NO: 75954 - DNA, 40 bp, Homo sapiens
cttatatctaaaaacgtcatcttgcctgaatttcttttgt

SEQ ID NO: 75955 - DNA, 40 bp, Homo sapiens
acaaaagaaattcaggcaagatgacgtttttagatataag

SEQ ID NO: 75956 - DNA, 40 bp, Homo sapiens
ttatatctaaaaacgtcatcttgcctgaatttcttttgtt

SEQ ID NO: 75957 - DNA, 40 bp, Homo sapiens
aacaaaagaaattcaggcaagatgacgtttttagatataa

SEQ ID NO: 75958 - DNA, 40 bp, Homo sapiens
tatatctaaaaacgtcatcttgcctgaatttcttttgttc

SEQ ID NO: 75959 - DNA, 40 bp, Homo sapiens
gaacaaaagaaattcaggcaagatgacgtttttagatata

SEQ ID NO: 75960 - DNA, 40 bp, Homo sapiens
atatctaaaaacgtcatcttgcctgaatttcttttgttct

SEQ ID NO: 75961 - DNA, 40 bp, Homo sapiens
agaacaaaagaaattcaggcaagatgacgtttttagatat

SEQ ID NO: 75962 - DNA, 40 bp, Homo sapiens
tatctaaaaacgtcatcttgcctgaatttcttttgttctt

SEQ ID NO: 75963 - DNA, 40 bp, Homo sapiens
aagaacaaaagaaattcaggcaagatgacgtttttagata

SEQ ID NO: 75964 - DNA, 40 bp, Homo sapiens
atctaaaaacgtcatcttgcctgaatttcttttgttcttc

SEQ ID NO: 75965 - DNA, 40 bp, Homo sapiens
gaagaacaaaagaaattcaggcaagatgacgtttttagat

SEQ ID NO: 75966 - DNA, 40 bp, Homo sapiens
tctaaaaacgtcatcttgcctgaatttcttttgttcttct

SEQ ID NO: 75967 - DNA, 40 bp, Homo sapiens
agaagaacaaaagaaattcaggcaagatgacgtttttaga

SEQ ID NO: 75968 - DNA, 40 bp, Homo sapiens
ctaaaaacgtcatcttgcctgaatttcttttgttcttcta

SEQ ID NO: 75969 - DNA, 40 bp, Homo sapiens
tagaagaacaaaagaaattcaggcaagatgacgtttttag

SEQ ID NO: 75970 - DNA, 40 bp, Homo sapiens
taaaaacgtcatcttgcctgaatttcttttgttcttctat

SEQ ID NO: 75971 - DNA, 40 bp, Homo sapiens
atagaagaacaaaagaaattcaggcaagatgacgttttta

SEQ ID NO: 75972 - DNA, 40 bp, Homo sapiens
aaaaacgtcatcttgcctgaatttcttttgttcttctata

SEQ ID NO: 75973 - DNA, 40 bp, Homo sapiens
tatagaagaacaaaagaaattcaggcaagatgacgttttt

SEQ ID NO: 75974 - DNA, 40 bp, Homo sapiens
aaaacgtcatcttgcctgaatttcttttgttcttctataa

SEQ ID NO: 75975 - DNA, 40 bp, Homo sapiens
ttatagaagaacaaaagaaattcaggcaagatgacgtttt

SEQ ID NO: 75976 - DNA, 40 bp, Homo sapiens
aaacgtcatcttgcctgaatttcttttgttcttctataaa

SEQ ID NO: 75977 - DNA, 40 bp, Homo sapiens
tttatagaagaacaaaagaaattcaggcaagatgacgttt

SEQ ID NO: 75978 - DNA, 40 bp, Homo sapiens
aacgtcatcttgcctgaatttcttttgttcttctataaat

SEQ ID NO: 75979 - DNA, 40 bp, Homo sapiens
atttatagaagaacaaaagaaattcaggcaagatgacgtt

SEQ ID NO: 75980 - DNA, 40 bp, Homo sapiens
acgtcatcttgcctgaatttcttttgttcttctataaata

SEQ ID NO: 75981 - DNA, 40 bp, Homo sapiens
tatttatagaagaacaaaagaaattcaggcaagatgacgt

SEQ ID NO: 75982 - DNA, 40 bp, Homo sapiens
cgtcatcttgcctgaatttcttttgttcttctataaataa

SEQ ID NO: 75983 - DNA, 40 bp, Homo sapiens
ttatttatagaagaacaaaagaaattcaggcaagatgacg

SEQ ID NO: 75984 - DNA, 40 bp, Homo sapiens
gtcatcttgcctgaatttcttttgttcttctataaataaa

SEQ ID NO: 75985 - DNA, 40 bp, Homo sapiens
tttatttatagaagaacaaaagaaattcaggcaagatgac

SEQ ID NO: 75986 - DNA, 40 bp, Homo sapiens
tcatcttgcctgaatttcttttgttcttctataaataaat

SEQ ID NO: 75987 - DNA, 40 bp, Homo sapiens
atttatttatagaagaacaaaagaaattcaggcaagatga

SEQ ID NO: 75988 - DNA, 40 bp, Homo sapiens
catcttgcctgaatttcttttgttcttctataaataaata

SEQ ID NO: 75989 - DNA, 40 bp, Homo sapiens
tatttatttatagaagaacaaaagaaattcaggcaagatg

SEQ ID NO: 75990 - DNA, 40 bp, Homo sapiens
atcttgcctgaatttcttttgttcttctataaataaatac

SEQ ID NO: 75991 - DNA, 40 bp, Homo sapiens
gtatttatttatagaagaacaaaagaaattcaggcaagat

SEQ ID NO: 75992 - DNA, 40 bp, Homo sapiens
tcttgcctgaatttcttttgttcttctataaataaatacc

SEQ ID NO: 75993 - DNA, 40 bp, Homo sapiens
ggtatttatttatagaagaacaaaagaaattcaggcaaga

SEQ ID NO: 75994 - DNA, 40 bp, Homo sapiens
cttgcctgaatttcttttgttcttctataaataaatacca

SEQ ID NO: 75995 - DNA, 40 bp, Homo sapiens
tggtatttatttatagaagaacaaaagaaattcaggcaag

SEQ ID NO: 75996 - DNA, 40 bp, Homo sapiens
ttgcctgaatttcttttgttcttctataaataaataccat

SEQ ID NO: 75997 - DNA, 40 bp, Homo sapiens
atggtatttatttatagaagaacaaaagaaattcaggcaa

SEQ ID NO: 75998 - DNA, 40 bp, Homo sapiens
tgcctgaatttcttttgttcttctataaataaataccatg

SEQ ID NO: 75999 - DNA, 40 bp, Homo sapiens
catggtatttatttatagaagaacaaaagaaattcaggca

SEQ ID NO: 76000 - DNA, 40 bp, Homo sapiens
gcctgaatttcttttgttcttctataaataaataccatgt

SEQ ID NO: 76001 - DNA, 40 bp, Homo sapiens
acatggtatttatttatagaagaacaaaagaaattcaggc

SEQ ID NO: 76002 - DNA, 40 bp, Homo sapiens
cctgaatttcttttgttcttctataaataaataccatgtt

SEQ ID NO: 76003 - DNA, 40 bp, Homo sapiens
aacatggtatttatttatagaagaacaaaagaaattcagg

SEQ ID NO: 76004 - DNA, 40 bp, Homo sapiens
ctgaatttcttttgttcttctataaataaataccatgtta

SEQ ID NO: 76005 - DNA, 40 bp, Homo sapiens
taacatggtatttatttatagaagaacaaaagaaattcag

SEQ ID NO: 76006 - DNA, 40 bp, Homo sapiens
tgaatttcttttgttcttctataaataaataccatgttat

SEQ ID NO: 76007 - DNA, 40 bp, Homo sapiens
ataacatggtatttatttatagaagaacaaaagaaattca

SEQ ID NO: 76008 - DNA, 40 bp, Homo sapiens
gaatttcttttgttcttctataaataaataccatgttatt

SEQ ID NO: 76009 - DNA, 40 bp, Homo sapiens
aataacatggtatttatttatagaagaacaaaagaaattc

SEQ ID NO: 76010 - DNA, 40 bp, Homo sapiens
aatttcttttgttcttctataaataaataccatgttattt

SEQ ID NO: 76011 - DNA, 40 bp, Homo sapiens
aaataacatggtatttatttatagaagaacaaaagaaatt

SEQ ID NO: 76012 - DNA, 40 bp, Homo sapiens
atttcttttgttcttctataaataaataccatgttatttc

SEQ ID NO: 76013 - DNA, 40 bp, Homo sapiens
gaaataacatggtatttatttatagaagaacaaaagaaat

SEQ ID NO: 76014 - DNA, 40 bp, Homo sapiens
tttcttttgttcttctataaataaataccatgttatttcc

SEQ ID NO: 76015 - DNA, 40 bp, Homo sapiens
ggaaataacatggtatttatttatagaagaacaaaagaaa

SEQ ID NO: 76016 - DNA, 40 bp, Homo sapiens
ttcttttgttcttctataaataaataccatgttatttcct

SEQ ID NO: 76017 - DNA, 40 bp, Homo sapiens
aggaaataacatggtatttatttatagaagaacaaaagaa

SEQ ID NO: 76018 - DNA, 40 bp, Homo sapiens
tcttttgttcttctataaataaataccatgttatttccta

SEQ ID NO: 76019 - DNA, 40 bp, Homo sapiens
taggaaataacatggtatttatttatagaagaacaaaaga

SEQ ID NO: 76020 - DNA, 40 bp, Homo sapiens
cttttgttcttctataaataaataccatgttatttcctac

SEQ ID NO: 76021 - DNA, 40 bp, Homo sapiens
gtaggaaataacatggtatttatttatagaagaacaaaag

SEQ ID NO: 76022 - DNA, 40 bp, Homo sapiens
ttttgttcttctataaataaataccatgttatttcctacc

SEQ ID NO: 76023 - DNA, 40 bp, Homo sapiens
ggtaggaaataacatggtatttatttatagaagaacaaaa

SEQ ID NO: 76024 - DNA, 40 bp, Homo sapiens
tttgttcttctataaataaataccatgttatttcctacct

SEQ ID NO: 76025 - DNA, 40 bp, Homo sapiens
aggtaggaaataacatggtatttatttatagaagaacaaa

SEQ ID NO: 76026 - DNA, 40 bp, Homo sapiens
ttgttcttctataaataaataccatgttatttcctacctt

SEQ ID NO: 76027 - DNA, 40 bp, Homo sapiens
aaggtaggaaataacatggtatttatttatagaagaacaa

SEQ ID NO: 76028 - DNA, 40 bp, Homo sapiens
tgttcttctataaataaataccatgttatttcctaccttc

SEQ ID NO: 76029 - DNA, 40 bp, Homo sapiens
gaaggtaggaaataacatggtatttatttatagaagaaca

SEQ ID NO: 76030 - DNA, 40 bp, Homo sapiens
gttcttctataaataaataccatgttatttcctaccttcc

SEQ ID NO: 76031 - DNA, 40 bp, Homo sapiens
ggaaggtaggaaataacatggtatttatttatagaagaac

SEQ ID NO: 76032 - DNA, 40 bp, Homo sapiens
ttcttctataaataaataccatgttatttcctaccttccc

SEQ ID NO: 76033 - DNA, 40 bp, Homo sapiens
gggaaggtaggaaataacatggtatttatttatagaagaa

SEQ ID NO: 76034 - DNA, 40 bp, Homo sapiens
tcttctataaataaataccatgttatttcctaccttccct

SEQ ID NO: 76035 - DNA, 40 bp, Homo sapiens
agggaaggtaggaaataacatggtatttatttatagaaga

SEQ ID NO: 76036 - DNA, 40 bp, Homo sapiens
cttctataaataaataccatgttatttcctaccttccctt

SEQ ID NO: 76037 - DNA, 40 bp, Homo sapiens
aagggaaggtaggaaataacatggtatttatttatagaag

SEQ ID NO: 76038 - DNA, 40 bp, Homo sapiens
ttctataaataaataccatgttatttcctaccttcccttg

SEQ ID NO: 76039 - DNA, 40 bp, Homo sapiens
caagggaaggtaggaaataacatggtatttatttatagaa

SEQ ID NO: 76040 - DNA, 40 bp, Homo sapiens
tctataaataaataccatgttatttcctaccttcccttga

SEQ ID NO: 76041 - DNA, 40 bp, Homo sapiens
tcaagggaaggtaggaaataacatggtatttatttataga

SEQ ID NO: 76042 - DNA, 40 bp, Homo sapiens
ctataaataaataccatgttatttcctaccttcccttgag

SEQ ID NO: 76043 - DNA, 40 bp, Homo sapiens
ctcaagggaaggtaggaaataacatggtatttatttatag

SEQ ID NO: 76044 - DNA, 40 bp, Homo sapiens
tataaataaataccatgttatttcctaccttcccttgagt

SEQ ID NO: 76045 - DNA, 40 bp, Homo sapiens
actcaagggaaggtaggaaataacatggtatttatttata

SEQ ID NO: 76046 - DNA, 40 bp, Homo sapiens
ataaataaataccatgttatttcctaccttcccttgagtc

SEQ ID NO: 76047 - DNA, 40 bp, Homo sapiens
gactcaagggaaggtaggaaataacatggtatttatttat

SEQ ID NO: 76048 - DNA, 40 bp, Homo sapiens
taaataaataccatgttatttcctaccttcccttgagtct

SEQ ID NO: 76049 - DNA, 40 bp, Homo sapiens
agactcaagggaaggtaggaaataacatggtatttattta

SEQ ID NO: 76050 - DNA, 40 bp, Homo sapiens
aaataaataccatgttatttcctaccttcccttgagtctt

SEQ ID NO: 76051 - DNA, 40 bp, Homo sapiens
aagactcaagggaaggtaggaaataacatggtatttattt

SEQ ID NO: 76052 - DNA, 40 bp, Homo sapiens
aataaataccatgttatttcctaccttcccttgagtcttg

SEQ ID NO: 76053 - DNA, 40 bp, Homo sapiens
caagactcaagggaaggtaggaaataacatggtatttatt

SEQ ID NO: 76054 - DNA, 40 bp, Homo sapiens
ataaataccatgttatttcctaccttcccttgagtcttgg

SEQ ID NO: 76055 - DNA, 40 bp, Homo sapiens
ccaagactcaagggaaggtaggaaataacatggtatttat

SEQ ID NO: 76056 - DNA, 40 bp, Homo sapiens
taaataccatgttatttcctaccttcccttgagtcttggc

SEQ ID NO: 76057 - DNA, 40 bp, Homo sapiens
gccaagactcaagggaaggtaggaaataacatggtattta

SEQ ID NO: 76058 - DNA, 40 bp, Homo sapiens
aaataccatgttatttcctaccttcccttgagtcttggct

SEQ ID NO: 76059 - DNA, 40 bp, Homo sapiens
agccaagactcaagggaaggtaggaaataacatggtattt

SEQ ID NO: 76060 - DNA, 40 bp, Homo sapiens
aataccatgttatttcctaccttcccttgagtcttggctc

SEQ ID NO: 76061 - DNA, 40 bp, Homo sapiens
gagccaagactcaagggaaggtaggaaataacatggtatt

SEQ ID NO: 76062 - DNA, 40 bp, Homo sapiens
ataccatgttatttcctaccttcccttgagtcttggctct

SEQ ID NO: 76063 - DNA, 40 bp, Homo sapiens
agagccaagactcaagggaaggtaggaaataacatggtat

SEQ ID NO: 76064 - DNA, 40 bp, Homo sapiens
taccatgttatttcctaccttcccttgagtcttggctctt

SEQ ID NO: 76065 - DNA, 40 bp, Homo sapiens
aagagccaagactcaagggaaggtaggaaataacatggta

SEQ ID NO: 76066 - DNA, 40 bp, Homo sapiens
accatgttatttcctaccttcccttgagtcttggctcttg

SEQ ID NO: 76067 - DNA, 40 bp, Homo sapiens
caagagccaagactcaagggaaggtaggaaataacatggt

SEQ ID NO: 76068 - DNA, 40 bp, Homo sapiens
ccatgttatttcctaccttcccttgagtcttggctcttgt

SEQ ID NO: 76069 - DNA, 40 bp, Homo sapiens
acaagagccaagactcaagggaaggtaggaaataacatgg

SEQ ID NO: 76070 - DNA, 40 bp, Homo sapiens
catgttatttcctaccttcccttgagtcttggctcttgtt

SEQ ID NO: 76071 - DNA, 40 bp, Homo sapiens
aacaagagccaagactcaagggaaggtaggaaataacatg

SEQ ID NO: 76072 - DNA, 40 bp, Homo sapiens
atgttatttcctaccttcccttgagtcttggctcttgttt

SEQ ID NO: 76073 - DNA, 40 bp, Homo sapiens
aaacaagagccaagactcaagggaaggtaggaaataacat

SEQ ID NO: 76074 - DNA, 40 bp, Homo sapiens
tgttatttcctaccttcccttgagtcttggctcttgtttg

SEQ ID NO: 76075 - DNA, 40 bp, Homo sapiens
caaacaagagccaagactcaagggaaggtaggaaataaca

SEQ ID NO: 76076 - DNA, 40 bp, Homo sapiens
gttatttcctaccttcccttgagtcttggctcttgtttgg

SEQ ID NO: 76077 - DNA, 40 bp, Homo sapiens
ccaaacaagagccaagactcaagggaaggtaggaaataac

SEQ ID NO: 76078 - DNA, 40 bp, Homo sapiens
ttatttcctaccttcccttgagtcttggctcttgtttgga

SEQ ID NO: 76079 - DNA, 40 bp, Homo sapiens
tccaaacaagagccaagactcaagggaaggtaggaaataa

SEQ ID NO: 76080 - DNA, 40 bp, Homo sapiens
tatttcctaccttcccttgagtcttggctcttgtttggaa

SEQ ID NO: 76081 - DNA, 40 bp, Homo sapiens
ttccaaacaagagccaagactcaagggaaggtaggaaata

SEQ ID NO: 76082 - DNA, 40 bp, Homo sapiens
atttcctaccttcccttgagtcttggctcttgtttggaat

SEQ ID NO: 76083 - DNA, 40 bp, Homo sapiens
attccaaacaagagccaagactcaagggaaggtaggaaat

SEQ ID NO: 76084 - DNA, 40 bp, Homo sapiens
tttcctaccttcccttgagtcttggctcttgtttggaatg

SEQ ID NO: 76085 - DNA, 40 bp, Homo sapiens
cattccaaacaagagccaagactcaagggaaggtaggaaa

SEQ ID NO: 76086 - DNA, 40 bp, Homo sapiens
ttcctaccttcccttgagtcttggctcttgtttggaatgc

SEQ ID NO: 76087 - DNA, 40 bp, Homo sapiens
gcattccaaacaagagccaagactcaagggaaggtaggaa

SEQ ID NO: 76088 - DNA, 40 bp, Homo sapiens
tcctaccttcccttgagtcttggctcttgtttggaatgcc

SEQ ID NO: 76089 - DNA, 40 bp, Homo sapiens
ggcattccaaacaagagccaagactcaagggaaggtagga

SEQ ID NO: 76090 - DNA, 40 bp, Homo sapiens
cctaccttcccttgagtcttggctcttgtttggaatgcca

SEQ ID NO: 76091 - DNA, 40 bp, Homo sapiens
tggcattccaaacaagagccaagactcaagggaaggtagg

SEQ ID NO: 76092 - DNA, 40 bp, Homo sapiens
ctaccttcccttgagtcttggctcttgtttggaatgccag

SEQ ID NO: 76093 - DNA, 40 bp, Homo sapiens
ctggcattccaaacaagagccaagactcaagggaaggtag

SEQ ID NO: 76094 - DNA, 40 bp, Homo sapiens
taccttcccttgagtcttggctcttgtttggaatgccagt

SEQ ID NO: 76095 - DNA, 40 bp, Homo sapiens
actggcattccaaacaagagccaagactcaagggaaggta

SEQ ID NO: 76096 - DNA, 40 bp, Homo sapiens
accttcccttgagtcttggctcttgtttggaatgccagta

SEQ ID NO: 76097 - DNA, 40 bp, Homo sapiens
tactggcattccaaacaagagccaagactcaagggaaggt

SEQ ID NO: 76098 - DNA, 40 bp, Homo sapiens
ccttcccttgagtcttggctcttgtttggaatgccagtat

SEQ ID NO: 76099 - DNA, 40 bp, Homo sapiens
atactggcattccaaacaagagccaagactcaagggaagg

SEQ ID NO: 76100 - DNA, 40 bp, Homo sapiens
cttcccttgagtcttggctcttgtttggaatgccagtatt

SEQ ID NO: 76101 - DNA, 40 bp, Homo sapiens
aatactggcattccaaacaagagccaagactcaagggaag

SEQ ID NO: 76102 - DNA, 40 bp, Homo sapiens
ttcccttgagtcttggctcttgtttggaatgccagtattt

SEQ ID NO: 76103 - DNA, 40 bp, Homo sapiens
aaatactggcattccaaacaagagccaagactcaagggaa

SEQ ID NO: 76104 - DNA, 40 bp, Homo sapiens
tcccttgagtcttggctcttgtttggaatgccagtatttt

SEQ ID NO: 76105 - DNA, 40 bp, Homo sapiens
aaaatactggcattccaaacaagagccaagactcaaggga

SEQ ID NO: 76106 - DNA, 40 bp, Homo sapiens
cccttgagtcttggctcttgtttggaatgccagtattttt

SEQ ID NO: 76107 - DNA, 40 bp, Homo sapiens
aaaaatactggcattccaaacaagagccaagactcaaggg

SEQ ID NO: 76108 - DNA, 40 bp, Homo sapiens
ccttgagtcttggctcttgtttggaatgccagtattttta

SEQ ID NO: 76109 - DNA, 40 bp, Homo sapiens
taaaaatactggcattccaaacaagagccaagactcaagg

SEQ ID NO: 76110 - DNA, 40 bp, Homo sapiens
cttgagtcttggctcttgtttggaatgccagtatttttat

SEQ ID NO: 76111 - DNA, 40 bp, Homo sapiens
ataaaaatactggcattccaaacaagagccaagactcaag

SEQ ID NO: 76112 - DNA, 40 bp, Homo sapiens
ttgagtcttggctcttgtttggaatgccagtatttttatc

SEQ ID NO: 76113 - DNA, 40 bp, Homo sapiens
gataaaaatactggcattccaaacaagagccaagactcaa

SEQ ID NO: 76114 - DNA, 40 bp, Homo sapiens
tgagtcttggctcttgtttggaatgccagtatttttatcc

SEQ ID NO: 76115 - DNA, 40 bp, Homo sapiens
ggataaaaatactggcattccaaacaagagccaagactca

SEQ ID NO: 76116 - DNA, 40 bp, Homo sapiens
gagtcttggctcttgtttggaatgccagtatttttatccc

SEQ ID NO: 76117 - DNA, 40 bp, Homo sapiens
gggataaaaatactggcattccaaacaagagccaagactc

SEQ ID NO: 76118 - DNA, 40 bp, Homo sapiens
agtcttggctcttgtttggaatgccagtatttttatccct

SEQ ID NO: 76119 - DNA, 40 bp, Homo sapiens
agggataaaaatactggcattccaaacaagagccaagact

SEQ ID NO: 76120 - DNA, 40 bp, Homo sapiens
gtcttggctcttgtttggaatgccagtatttttatcccta

SEQ ID NO: 76121 - DNA, 40 bp, Homo sapiens
tagggataaaaatactggcattccaaacaagagccaagac

SEQ ID NO: 76122 - DNA, 40 bp, Homo sapiens
tcttggctcttgtttggaatgccagtatttttatccctag

SEQ ID NO: 76123 - DNA, 40 bp, Homo sapiens
ctagggataaaaatactggcattccaaacaagagccaaga

SEQ ID NO: 76124 - DNA, 40 bp, Homo sapiens
cttggctcttgtttggaatgccagtatttttatccctagt

SEQ ID NO: 76125 - DNA, 40 bp, Homo sapiens
actagggataaaaatactggcattccaaacaagagccaag

SEQ ID NO: 76126 - DNA, 40 bp, Homo sapiens
ttggctcttgtttggaatgccagtatttttatccctagtc

SEQ ID NO: 76127 - DNA, 40 bp, Homo sapiens
gactagggataaaaatactggcattccaaacaagagccaa

SEQ ID NO: 76128 - DNA, 40 bp, Homo sapiens
tggctcttgtttggaatgccagtatttttatccctagtct

SEQ ID NO: 76129 - DNA, 40 bp, Homo sapiens
agactagggataaaaatactggcattccaaacaagagcca

SEQ ID NO: 76130 - DNA, 40 bp, Homo sapiens
ggctcttgtttggaatgccagtatttttatccctagtctt

SEQ ID NO: 76131 - DNA, 40 bp, Homo sapiens
aagactagggataaaaatactggcattccaaacaagagcc

SEQ ID NO: 76132 - DNA, 40 bp, Homo sapiens
gctcttgtttggaatgccagtatttttatccctagtctta

SEQ ID NO: 76133 - DNA, 40 bp, Homo sapiens
taagactagggataaaaatactggcattccaaacaagagc

SEQ ID NO: 76134 - DNA, 40 bp, Homo sapiens
ctcttgtttggaatgccagtatttttatccctagtcttac

SEQ ID NO: 76135 - DNA, 40 bp, Homo sapiens
gtaagactagggataaaaatactggcattccaaacaagag

SEQ ID NO: 76136 - DNA, 40 bp, Homo sapiens
tcttgtttggaatgccagtatttttatccctagtcttact

SEQ ID NO: 76137 - DNA, 40 bp, Homo sapiens
agtaagactagggataaaaatactggcattccaaacaaga

SEQ ID NO: 76138 - DNA, 40 bp, Homo sapiens
cttgtttggaatgccagtatttttatccctagtcttacta

SEQ ID NO: 76139 - DNA, 40 bp, Homo sapiens
tagtaagactagggataaaaatactggcattccaaacaag

SEQ ID NO: 76140 - DNA, 40 bp, Homo sapiens
ttgtttggaatgccagtatttttatccctagtcttactaa

SEQ ID NO: 76141 - DNA, 40 bp, Homo sapiens
ttagtaagactagggataaaaatactggcattccaaacaa

SEQ ID NO: 76142 - DNA, 40 bp, Homo sapiens
tgtttggaatgccagtatttttatccctagtcttactaat

SEQ ID NO: 76143 - DNA, 40 bp, Homo sapiens
attagtaagactagggataaaaatactggcattccaaaca

SEQ ID NO: 76144 - DNA, 40 bp, Homo sapiens
gtttggaatgccagtatttttatccctagtcttactaatt

SEQ ID NO: 76145 - DNA, 40 bp, Homo sapiens
aattagtaagactagggataaaaatactggcattccaaac

SEQ ID NO: 76146 - DNA, 40 bp, Homo sapiens
tttggaatgccagtatttttatccctagtcttactaatta

SEQ ID NO: 76147 - DNA, 40 bp, Homo sapiens
taattagtaagactagggataaaaatactggcattccaaa

SEQ ID NO: 76148 - DNA, 40 bp, Homo sapiens
ttggaatgccagtatttttatccctagtcttactaattag

SEQ ID NO: 76149 - DNA, 40 bp, Homo sapiens
ctaattagtaagactagggataaaaatactggcattccaa

SEQ ID NO: 76150 - DNA, 40 bp, Homo sapiens
tggaatgccagtatttttatccctagtcttactaattagc

SEQ ID NO: 76151 - DNA, 40 bp, Homo sapiens
gctaattagtaagactagggataaaaatactggcattcca

SEQ ID NO: 76152 - DNA, 40 bp, Homo sapiens
ggaatgccagtatttttatccctagtcttactaattagct

SEQ ID NO: 76153 - DNA, 40 bp, Homo sapiens
agctaattagtaagactagggataaaaatactggcattcc

SEQ ID NO: 76154 - DNA, 40 bp, Homo sapiens
gaatgccagtatttttatccctagtcttactaattagcta

SEQ ID NO: 76155 - DNA, 40 bp, Homo sapiens
tagctaattagtaagactagggataaaaatactggcattc

SEQ ID NO: 76156 - DNA, 40 bp, Homo sapiens
aatgccagtatttttatccctagtcttactaattagctaa

SEQ ID NO: 76157 - DNA, 40 bp, Homo sapiens
ttagctaattagtaagactagggataaaaatactggcatt

SEQ ID NO: 76158 - DNA, 40 bp, Homo sapiens
atgccagtatttttatccctagtcttactaattagctaac

SEQ ID NO: 76159 - DNA, 40 bp, Homo sapiens
gttagctaattagtaagactagggataaaaatactggcat

SEQ ID NO: 76160 - DNA, 40 bp, Homo sapiens
tgccagtatttttatccctagtcttactaattagctaaca

SEQ ID NO: 76161 - DNA, 40 bp, Homo sapiens
tgttagctaattagtaagactagggataaaaatactggca

SEQ ID NO: 76162 - DNA, 40 bp, Homo sapiens
gccagtatttttatccctagtcttactaattagctaacac

SEQ ID NO: 76163 - DNA, 40 bp, Homo sapiens
gtgttagctaattagtaagactagggataaaaatactggc

SEQ ID NO: 76164 - DNA, 40 bp, Homo sapiens
ccagtatttttatccctagtcttactaattagctaacact

SEQ ID NO: 76165 - DNA, 40 bp, Homo sapiens
agtgttagctaattagtaagactagggataaaaatactgg

SEQ ID NO: 76166 - DNA, 40 bp, Homo sapiens
cagtatttttatccctagtcttactaattagctaacactc

SEQ ID NO: 76167 - DNA, 40 bp, Homo sapiens
gagtgttagctaattagtaagactagggataaaaatactg

SEQ ID NO: 76168 - DNA, 40 bp, Homo sapiens
agtatttttatccctagtcttactaattagctaacactct

SEQ ID NO: 76169 - DNA, 40 bp, Homo sapiens
agagtgttagctaattagtaagactagggataaaaatact

SEQ ID NO: 76170 - DNA, 40 bp, Homo sapiens
gtatttttatccctagtcttactaattagctaacactctc

SEQ ID NO: 76171 - DNA, 40 bp, Homo sapiens
gagagtgttagctaattagtaagactagggataaaaatac

SEQ ID NO: 76172 - DNA, 40 bp, Homo sapiens
tatttttatccctagtcttactaattagctaacactctca

SEQ ID NO: 76173 - DNA, 40 bp, Homo sapiens
tgagagtgttagctaattagtaagactagggataaaaata

SEQ ID NO: 76174 - DNA, 40 bp, Homo sapiens
atttttatccctagtcttactaattagctaacactctcat

SEQ ID NO: 76175 - DNA, 40 bp, Homo sapiens
atgagagtgttagctaattagtaagactagggataaaaat

SEQ ID NO: 76176 - DNA, 40 bp, Homo sapiens
tttttatccctagtcttactaattagctaacactctcatg

SEQ ID NO: 76177 - DNA, 40 bp, Homo sapiens
catgagagtgttagctaattagtaagactagggataaaaa

SEQ ID NO: 76178 - DNA, 40 bp, Homo sapiens
ttttatccctagtcttactaattagctaacactctcatga

SEQ ID NO: 76179 - DNA, 40 bp, Homo sapiens
tcatgagagtgttagctaattagtaagactagggataaaa

SEQ ID NO: 76180 - DNA, 40 bp, Homo sapiens
tttatccctagtcttactaattagctaacactctcatgat

SEQ ID NO: 76181 - DNA, 40 bp, Homo sapiens
atcatgagagtgttagctaattagtaagactagggataaa

SEQ ID NO: 76182 - DNA, 40 bp, Homo sapiens
ttatccctagtcttactaattagctaacactctcatgatt

SEQ ID NO: 76183 - DNA, 40 bp, Homo sapiens
aatcatgagagtgttagctaattagtaagactagggataa

SEQ ID NO: 76184 - DNA, 40 bp, Homo sapiens
tatccctagtcttactaattagctaacactctcatgattc

SEQ ID NO: 76185 - DNA, 40 bp, Homo sapiens
gaatcatgagagtgttagctaattagtaagactagggata

SEQ ID NO: 76186 - DNA, 40 bp, Homo sapiens
atccctagtcttactaattagctaacactctcatgattcc

SEQ ID NO: 76187 - DNA, 40 bp, Homo sapiens
ggaatcatgagagtgttagctaattagtaagactagggat

SEQ ID NO: 76188 - DNA, 40 bp, Homo sapiens
tccctagtcttactaattagctaacactctcatgattccc

SEQ ID NO: 76189 - DNA, 40 bp, Homo sapiens
gggaatcatgagagtgttagctaattagtaagactaggga

SEQ ID NO: 76190 - DNA, 40 bp, Homo sapiens
ccctagtcttactaattagctaacactctcatgattcccc

SEQ ID NO: 76191 - DNA, 40 bp, Homo sapiens
ggggaatcatgagagtgttagctaattagtaagactaggg

SEQ ID NO: 76192 - DNA, 40 bp, Homo sapiens
cctagtcttactaattagctaacactctcatgattcccca

SEQ ID NO: 76193 - DNA, 40 bp, Homo sapiens
tggggaatcatgagagtgttagctaattagtaagactagg

SEQ ID NO: 76194 - DNA, 40 bp, Homo sapiens
ctagtcttactaattagctaacactctcatgattccccag

SEQ ID NO: 76195 - DNA, 40 bp, Homo sapiens
ctggggaatcatgagagtgttagctaattagtaagactag

SEQ ID NO: 76196 - DNA, 40 bp, Homo sapiens
tagtcttactaattagctaacactctcatgattccccagt

SEQ ID NO: 76197 - DNA, 40 bp, Homo sapiens
actggggaatcatgagagtgttagctaattagtaagacta

SEQ ID NO: 76198 - DNA, 40 bp, Homo sapiens
agtcttactaattagctaacactctcatgattccccagtc

SEQ ID NO: 76199 - DNA, 40 bp, Homo sapiens
gactggggaatcatgagagtgttagctaattagtaagact

SEQ ID NO: 76200 - DNA, 40 bp, Homo sapiens
gtcttactaattagctaacactctcatgattccccagtct

SEQ ID NO: 76201 - DNA, 40 bp, Homo sapiens
agactggggaatcatgagagtgttagctaattagtaagac

SEQ ID NO: 76202 - DNA, 40 bp, Homo sapiens
tcttactaattagctaacactctcatgattccccagtctc

SEQ ID NO: 76203 - DNA, 40 bp, Homo sapiens
gagactggggaatcatgagagtgttagctaattagtaaga

SEQ ID NO: 76204 - DNA, 40 bp, Homo sapiens
cttactaattagctaacactctcatgattccccagtctcc

SEQ ID NO: 76205 - DNA, 40 bp, Homo sapiens
ggagactggggaatcatgagagtgttagctaattagtaag

SEQ ID NO: 76206 - DNA, 40 bp, Homo sapiens
ttactaattagctaacactctcatgattccccagtctcct

SEQ ID NO: 76207 - DNA, 40 bp, Homo sapiens
aggagactggggaatcatgagagtgttagctaattagtaa

SEQ ID NO: 76208 - DNA, 40 bp, Homo sapiens
tactaattagctaacactctcatgattccccagtctccta

SEQ ID NO: 76209 - DNA, 40 bp, Homo sapiens
taggagactggggaatcatgagagtgttagctaattagta

SEQ ID NO: 76210 - DNA, 40 bp, Homo sapiens
actaattagctaacactctcatgattccccagtctcctac

SEQ ID NO: 76211 - DNA, 40 bp, Homo sapiens
gtaggagactggggaatcatgagagtgttagctaattagt

SEQ ID NO: 76212 - DNA, 40 bp, Homo sapiens
ctaattagctaacactctcatgattccccagtctcctact

SEQ ID NO: 76213 - DNA, 40 bp, Homo sapiens
agtaggagactggggaatcatgagagtgttagctaattag

SEQ ID NO: 76214 - DNA, 40 bp, Homo sapiens
taattagctaacactctcatgattccccagtctcctactc

SEQ ID NO: 76215 - DNA, 40 bp, Homo sapiens
gagtaggagactggggaatcatgagagtgttagctaatta

SEQ ID NO: 76216 - DNA, 40 bp, Homo sapiens
aattagctaacactctcatgattccccagtctcctactct

SEQ ID NO: 76217 - DNA, 40 bp, Homo sapiens
agagtaggagactggggaatcatgagagtgttagctaatt

SEQ ID NO: 76218 - DNA, 40 bp, Homo sapiens
attagctaacactctcatgattccccagtctcctactctc

SEQ ID NO: 76219 - DNA, 40 bp, Homo sapiens
gagagtaggagactggggaatcatgagagtgttagctaat

SEQ ID NO: 76220 - DNA, 40 bp, Homo sapiens
ttagctaacactctcatgattccccagtctcctactctct

SEQ ID NO: 76221 - DNA, 40 bp, Homo sapiens
agagagtaggagactggggaatcatgagagtgttagctaa

SEQ ID NO: 76222 - DNA, 40 bp, Homo sapiens
tagctaacactctcatgattccccagtctcctactctcta

SEQ ID NO: 76223 - DNA, 40 bp, Homo sapiens
tagagagtaggagactggggaatcatgagagtgttagcta

SEQ ID NO: 76224 - DNA, 40 bp, Homo sapiens
agctaacactctcatgattccccagtctcctactctctaa

SEQ ID NO: 76225 - DNA, 40 bp, Homo sapiens
ttagagagtaggagactggggaatcatgagagtgttagct

SEQ ID NO: 76226 - DNA, 40 bp, Homo sapiens
gctaacactctcatgattccccagtctcctactctctaaa

SEQ ID NO: 76227 - DNA, 40 bp, Homo sapiens
tttagagagtaggagactggggaatcatgagagtgttagc

SEQ ID NO: 76228 - DNA, 40 bp, Homo sapiens
ctaacactctcatgattccccagtctcctactctctaaaa

SEQ ID NO: 76229 - DNA, 40 bp, Homo sapiens
ttttagagagtaggagactggggaatcatgagagtgttag

SEQ ID NO: 76230 - DNA, 40 bp, Homo sapiens
taacactctcatgattccccagtctcctactctctaaaaa

SEQ ID NO: 76231 - DNA, 40 bp, Homo sapiens
tttttagagagtaggagactggggaatcatgagagtgtta

SEQ ID NO: 76232 - DNA, 40 bp, Homo sapiens
aacactctcatgattccccagtctcctactctctaaaaac

SEQ ID NO: 76233 - DNA, 40 bp, Homo sapiens
gtttttagagagtaggagactggggaatcatgagagtgtt

SEQ ID NO: 76234 - DNA, 40 bp, Homo sapiens
acactctcatgattccccagtctcctactctctaaaaacc

SEQ ID NO: 76235 - DNA, 40 bp, Homo sapiens
ggtttttagagagtaggagactggggaatcatgagagtgt

SEQ ID NO: 76236 - DNA, 40 bp, Homo sapiens
cactctcatgattccccagtctcctactctctaaaaacct

SEQ ID NO: 76237 - DNA, 40 bp, Homo sapiens
aggtttttagagagtaggagactggggaatcatgagagtg

SEQ ID NO: 76238 - DNA, 40 bp, Homo sapiens
actctcatgattccccagtctcctactctctaaaaacctt

SEQ ID NO: 76239 - DNA, 40 bp, Homo sapiens
aaggtttttagagagtaggagactggggaatcatgagagt

SEQ ID NO: 76240 - DNA, 40 bp, Homo sapiens
ctctcatgattccccagtctcctactctctaaaaaccttt

SEQ ID NO: 76241 - DNA, 40 bp, Homo sapiens
aaaggtttttagagagtaggagactggggaatcatgagag

SEQ ID NO: 76242 - DNA, 40 bp, Homo sapiens
tctcatgattccccagtctcctactctctaaaaacctttc

SEQ ID NO: 76243 - DNA, 40 bp, Homo sapiens
gaaaggtttttagagagtaggagactggggaatcatgaga

SEQ ID NO: 76244 - DNA, 40 bp, Homo sapiens
ctcatgattccccagtctcctactctctaaaaacctttct

SEQ ID NO: 76245 - DNA, 40 bp, Homo sapiens
agaaaggtttttagagagtaggagactggggaatcatgag

SEQ ID NO: 76246 - DNA, 40 bp, Homo sapiens
tcatgattccccagtctcctactctctaaaaacctttctt

SEQ ID NO: 76247 - DNA, 40 bp, Homo sapiens
aagaaaggtttttagagagtaggagactggggaatcatga

SEQ ID NO: 76248 - DNA, 40 bp, Homo sapiens
catgattccccagtctcctactctctaaaaacctttcttt

SEQ ID NO: 76249 - DNA, 40 bp, Homo sapiens
aaagaaaggtttttagagagtaggagactggggaatcatg

SEQ ID NO: 76250 - DNA, 40 bp, Homo sapiens
atgattccccagtctcctactctctaaaaacctttcttta

SEQ ID NO: 76251 - DNA, 40 bp, Homo sapiens
taaagaaaggtttttagagagtaggagactggggaatcat

SEQ ID NO: 76252 - DNA, 40 bp, Homo sapiens
tgattccccagtctcctactctctaaaaacctttctttaa

SEQ ID NO: 76253 - DNA, 40 bp, Homo sapiens
ttaaagaaaggtttttagagagtaggagactggggaatca

SEQ ID NO: 76254 - DNA, 40 bp, Homo sapiens
gattccccagtctcctactctctaaaaacctttctttaaa

SEQ ID NO: 76255 - DNA, 40 bp, Homo sapiens
tttaaagaaaggtttttagagagtaggagactggggaatc

SEQ ID NO: 76256 - DNA, 40 bp, Homo sapiens
attccccagtctcctactctctaaaaacctttctttaaac

SEQ ID NO: 76257 - DNA, 40 bp, Homo sapiens
gtttaaagaaaggtttttagagagtaggagactggggaat

SEQ ID NO: 76258 - DNA, 40 bp, Homo sapiens
ttccccagtctcctactctctaaaaacctttctttaaacc

SEQ ID NO: 76259 - DNA, 40 bp, Homo sapiens
ggtttaaagaaaggtttttagagagtaggagactggggaa

SEQ ID NO: 76260 - DNA, 40 bp, Homo sapiens
tccccagtctcctactctctaaaaacctttctttaaaccc

SEQ ID NO: 76261 - DNA, 40 bp, Homo sapiens
gggtttaaagaaaggtttttagagagtaggagactgggga

SEQ ID NO: 76262 - DNA, 40 bp, Homo sapiens
ccccagtctcctactctctaaaaacctttctttaaaccct

SEQ ID NO: 76263 - DNA, 40 bp, Homo sapiens
agggtttaaagaaaggtttttagagagtaggagactgggg

SEQ ID NO: 76264 - DNA, 40 bp, Homo sapiens
cccagtctcctactctctaaaaacctttctttaaaccctt

SEQ ID NO: 76265 - DNA, 40 bp, Homo sapiens
aagggtttaaagaaaggtttttagagagtaggagactggg

SEQ ID NO: 76266 - DNA, 40 bp, Homo sapiens
ccagtctcctactctctaaaaacctttctttaaaccctta

SEQ ID NO: 76267 - DNA, 40 bp, Homo sapiens
taagggtttaaagaaaggtttttagagagtaggagactgg

SEQ ID NO: 76268 - DNA, 40 bp, Homo sapiens
cagtctcctactctctaaaaacctttctttaaacccttag

SEQ ID NO: 76269 - DNA, 40 bp, Homo sapiens
ctaagggtttaaagaaaggtttttagagagtaggagactg

SEQ ID NO: 76270 - DNA, 40 bp, Homo sapiens
agtctcctactctctaaaaacctttctttaaacccttaga

SEQ ID NO: 76271 - DNA, 40 bp, Homo sapiens
tctaagggtttaaagaaaggtttttagagagtaggagact

SEQ ID NO: 76272 - DNA, 40 bp, Homo sapiens
gtctcctactctctaaaaacctttctttaaacccttagac

SEQ ID NO: 76273 - DNA, 40 bp, Homo sapiens
gtctaagggtttaaagaaaggtttttagagagtaggagac

SEQ ID NO: 76274 - DNA, 40 bp, Homo sapiens
tctcctactctctaaaaacctttctttaaacccttagact

SEQ ID NO: 76275 - DNA, 40 bp, Homo sapiens
agtctaagggtttaaagaaaggtttttagagagtaggaga

SEQ ID NO: 76276 - DNA, 40 bp, Homo sapiens
ctcctactctctaaaaacctttctttaaacccttagacta

SEQ ID NO: 76277 - DNA, 40 bp, Homo sapiens
tagtctaagggtttaaagaaaggtttttagagagtaggag

SEQ ID NO: 76278 - DNA, 40 bp, Homo sapiens
tcctactctctaaaaacctttctttaaacccttagactag

SEQ ID NO: 76279 - DNA, 40 bp, Homo sapiens
ctagtctaagggtttaaagaaaggtttttagagagtagga

SEQ ID NO: 76280 - DNA, 40 bp, Homo sapiens
cctactctctaaaaacctttctttaaacccttagactagg

SEQ ID NO: 76281 - DNA, 40 bp, Homo sapiens
cctagtctaagggtttaaagaaaggtttttagagagtagg

SEQ ID NO: 76282 - DNA, 40 bp, Homo sapiens
ctactctctaaaaacctttctttaaacccttagactaggc

SEQ ID NO: 76283 - DNA, 40 bp, Homo sapiens
gcctagtctaagggtttaaagaaaggtttttagagagtag

SEQ ID NO: 76284 - DNA, 40 bp, Homo sapiens
tactctctaaaaacctttctttaaacccttagactaggca

SEQ ID NO: 76285 - DNA, 40 bp, Homo sapiens
tgcctagtctaagggtttaaagaaaggtttttagagagta

SEQ ID NO: 76286 - DNA, 40 bp, Homo sapiens
actctctaaaaacctttctttaaacccttagactaggcat

SEQ ID NO: 76287 - DNA, 40 bp, Homo sapiens
atgcctagtctaagggtttaaagaaaggtttttagagagt

SEQ ID NO: 76288 - DNA, 40 bp, Homo sapiens
ctctctaaaaacctttctttaaacccttagactaggcatg

SEQ ID NO: 76289 - DNA, 40 bp, Homo sapiens
catgcctagtctaagggtttaaagaaaggtttttagagag

SEQ ID NO: 76290 - DNA, 40 bp, Homo sapiens
tctctaaaaacctttctttaaacccttagactaggcatgg

SEQ ID NO: 76291 - DNA, 40 bp, Homo sapiens
ccatgcctagtctaagggtttaaagaaaggtttttagaga

SEQ ID NO: 76292 - DNA, 40 bp, Homo sapiens
ctctaaaaacctttctttaaacccttagactaggcatgga

SEQ ID NO: 76293 - DNA, 40 bp, Homo sapiens
tccatgcctagtctaagggtttaaagaaaggtttttagag

SEQ ID NO: 76294 - DNA, 40 bp, Homo sapiens
tctaaaaacctttctttaaacccttagactaggcatggag

SEQ ID NO: 76295 - DNA, 40 bp, Homo sapiens
ctccatgcctagtctaagggtttaaagaaaggtttttaga

SEQ ID NO: 76296 - DNA, 40 bp, Homo sapiens
ctaaaaacctttctttaaacccttagactaggcatggagc

SEQ ID NO: 76297 - DNA, 40 bp, Homo sapiens
gctccatgcctagtctaagggtttaaagaaaggtttttag

SEQ ID NO: 76298 - DNA, 40 bp, Homo sapiens
taaaaacctttctttaaacccttagactaggcatggagcc

SEQ ID NO: 76299 - DNA, 40 bp, Homo sapiens
ggctccatgcctagtctaagggtttaaagaaaggttttta

SEQ ID NO: 76300 - DNA, 40 bp, Homo sapiens
aaaaacctttctttaaacccttagactaggcatggagccc

SEQ ID NO: 76301 - DNA, 40 bp, Homo sapiens
gggctccatgcctagtctaagggtttaaagaaaggttttt

SEQ ID NO: 76302 - DNA, 40 bp, Homo sapiens
aaaacctttctttaaacccttagactaggcatggagccct

SEQ ID NO: 76303 - DNA, 40 bp, Homo sapiens
agggctccatgcctagtctaagggtttaaagaaaggtttt

SEQ ID NO: 76304 - DNA, 40 bp, Homo sapiens
aaacctttctttaaacccttagactaggcatggagccctt

SEQ ID NO: 76305 - DNA, 40 bp, Homo sapiens
aagggctccatgcctagtctaagggtttaaagaaaggttt

SEQ ID NO: 76306 - DNA, 40 bp, Homo sapiens
aacctttctttaaacccttagactaggcatggagcccttc

SEQ ID NO: 76307 - DNA, 40 bp, Homo sapiens
gaagggctccatgcctagtctaagggtttaaagaaaggtt

SEQ ID NO: 76308 - DNA, 40 bp, Homo sapiens
acctttctttaaacccttagactaggcatggagcccttcc

SEQ ID NO: 76309 - DNA, 40 bp, Homo sapiens
ggaagggctccatgcctagtctaagggtttaaagaaaggt

SEQ ID NO: 76310 - DNA, 40 bp, Homo sapiens
cctttctttaaacccttagactaggcatggagcccttcct

SEQ ID NO: 76311 - DNA, 40 bp, Homo sapiens
aggaagggctccatgcctagtctaagggtttaaagaaagg

SEQ ID NO: 76312 - DNA, 40 bp, Homo sapiens
ctttctttaaacccttagactaggcatggagcccttcctg

SEQ ID NO: 76313 - DNA, 40 bp, Homo sapiens
caggaagggctccatgcctagtctaagggtttaaagaaag

SEQ ID NO: 76314 - DNA, 40 bp, Homo sapiens
tttctttaaacccttagactaggcatggagcccttcctgt

SEQ ID NO: 76315 - DNA, 40 bp, Homo sapiens
acaggaagggctccatgcctagtctaagggtttaaagaaa

SEQ ID NO: 76316 - DNA, 40 bp, Homo sapiens
ttctttaaacccttagactaggcatggagcccttcctgtg

SEQ ID NO: 76317 - DNA, 40 bp, Homo sapiens
cacaggaagggctccatgcctagtctaagggtttaaagaa

SEQ ID NO: 76318 - DNA, 40 bp, Homo sapiens
tctttaaacccttagactaggcatggagcccttcctgtgt

SEQ ID NO: 76319 - DNA, 40 bp, Homo sapiens
acacaggaagggctccatgcctagtctaagggtttaaaga

SEQ ID NO: 76320 - DNA, 40 bp, Homo sapiens
ctttaaacccttagactaggcatggagcccttcctgtgta

SEQ ID NO: 76321 - DNA, 40 bp, Homo sapiens
tacacaggaagggctccatgcctagtctaagggtttaaag

SEQ ID NO: 76322 - DNA, 40 bp, Homo sapiens
tttaaacccttagactaggcatggagcccttcctgtgtat

SEQ ID NO: 76323 - DNA, 40 bp, Homo sapiens
atacacaggaagggctccatgcctagtctaagggtttaaa

SEQ ID NO: 76324 - DNA, 40 bp, Homo sapiens
ttaaacccttagactaggcatggagcccttcctgtgtatt

SEQ ID NO: 76325 - DNA, 40 bp, Homo sapiens
aatacacaggaagggctccatgcctagtctaagggtttaa

SEQ ID NO: 76326 - DNA, 40 bp, Homo sapiens
taaacccttagactaggcatggagcccttcctgtgtattc

SEQ ID NO: 76327 - DNA, 40 bp, Homo sapiens
gaatacacaggaagggctccatgcctagtctaagggttta

SEQ ID NO: 76328 - DNA, 40 bp, Homo sapiens
aaacccttagactaggcatggagcccttcctgtgtattcc

SEQ ID NO: 76329 - DNA, 40 bp, Homo sapiens
ggaatacacaggaagggctccatgcctagtctaagggttt

SEQ ID NO: 76330 - DNA, 40 bp, Homo sapiens
aacccttagactaggcatggagcccttcctgtgtattccc

SEQ ID NO: 76331 - DNA, 40 bp, Homo sapiens
gggaatacacaggaagggctccatgcctagtctaagggtt

SEQ ID NO: 76332 - DNA, 40 bp, Homo sapiens
acccttagactaggcatggagcccttcctgtgtattccca

SEQ ID NO: 76333 - DNA, 40 bp, Homo sapiens
tgggaatacacaggaagggctccatgcctagtctaagggt

SEQ ID NO: 76334 - DNA, 40 bp, Homo sapiens
cccttagactaggcatggagcccttcctgtgtattcccag

SEQ ID NO: 76335 - DNA, 40 bp, Homo sapiens
ctgggaatacacaggaagggctccatgcctagtctaaggg

SEQ ID NO: 76336 - DNA, 40 bp, Homo sapiens
ccttagactaggcatggagcccttcctgtgtattcccaga

SEQ ID NO: 76337 - DNA, 40 bp, Homo sapiens
tctgggaatacacaggaagggctccatgcctagtctaagg

SEQ ID NO: 76338 - DNA, 40 bp, Homo sapiens
cttagactaggcatggagcccttcctgtgtattcccagaa

SEQ ID NO: 76339 - DNA, 40 bp, Homo sapiens
ttctgggaatacacaggaagggctccatgcctagtctaag

SEQ ID NO: 76340 - DNA, 40 bp, Homo sapiens
ttagactaggcatggagcccttcctgtgtattcccagaat

SEQ ID NO: 76341 - DNA, 40 bp, Homo sapiens
attctgggaatacacaggaagggctccatgcctagtctaa

SEQ ID NO: 76342 - DNA, 40 bp, Homo sapiens
tagactaggcatggagcccttcctgtgtattcccagaata

SEQ ID NO: 76343 - DNA, 40 bp, Homo sapiens
tattctgggaatacacaggaagggctccatgcctagtcta

SEQ ID NO: 76344 - DNA, 40 bp, Homo sapiens
agactaggcatggagcccttcctgtgtattcccagaatac

SEQ ID NO: 76345 - DNA, 40 bp, Homo sapiens
gtattctgggaatacacaggaagggctccatgcctagtct

SEQ ID NO: 76346 - DNA, 40 bp, Homo sapiens
gactaggcatggagcccttcctgtgtattcccagaatact

SEQ ID NO: 76347 - DNA, 40 bp, Homo sapiens
agtattctgggaatacacaggaagggctccatgcctagtc

SEQ ID NO: 76348 - DNA, 40 bp, Homo sapiens
actaggcatggagcccttcctgtgtattcccagaatacta

SEQ ID NO: 76349 - DNA, 40 bp, Homo sapiens
tagtattctgggaatacacaggaagggctccatgcctagt

SEQ ID NO: 76350 - DNA, 40 bp, Homo sapiens
ctaggcatggagcccttcctgtgtattcccagaatactat

SEQ ID NO: 76351 - DNA, 40 bp, Homo sapiens
atagtattctgggaatacacaggaagggctccatgcctag

SEQ ID NO: 76352 - DNA, 40 bp, Homo sapiens
taggcatggagcccttcctgtgtattcccagaatactatt

SEQ ID NO: 76353 - DNA, 40 bp, Homo sapiens
aatagtattctgggaatacacaggaagggctccatgccta

SEQ ID NO: 76354 - DNA, 40 bp, Homo sapiens
aggcatggagcccttcctgtgtattcccagaatactattc

SEQ ID NO: 76355 - DNA, 40 bp, Homo sapiens
gaatagtattctgggaatacacaggaagggctccatgcct

SEQ ID NO: 76356 - DNA, 40 bp, Homo sapiens
ggcatggagcccttcctgtgtattcccagaatactattct

SEQ ID NO: 76357 - DNA, 40 bp, Homo sapiens
agaatagtattctgggaatacacaggaagggctccatgcc

SEQ ID NO: 76358 - DNA, 40 bp, Homo sapiens
gcatggagcccttcctgtgtattcccagaatactattctt

SEQ ID NO: 76359 - DNA, 40 bp, Homo sapiens
aagaatagtattctgggaatacacaggaagggctccatgc

SEQ ID NO: 76360 - DNA, 40 bp, Homo sapiens
catggagcccttcctgtgtattcccagaatactattctta

SEQ ID NO: 76361 - DNA, 40 bp, Homo sapiens
taagaatagtattctgggaatacacaggaagggctccatg

SEQ ID NO: 76362 - DNA, 40 bp, Homo sapiens
atggagcccttcctgtgtattcccagaatactattcttaa

SEQ ID NO: 76363 - DNA, 40 bp, Homo sapiens
ttaagaatagtattctgggaatacacaggaagggctccat

SEQ ID NO: 76364 - DNA, 40 bp, Homo sapiens
tggagcccttcctgtgtattcccagaatactattcttaac

SEQ ID NO: 76365 - DNA, 40 bp, Homo sapiens
gttaagaatagtattctgggaatacacaggaagggctcca

SEQ ID NO: 76366 - DNA, 40 bp, Homo sapiens
ggagcccttcctgtgtattcccagaatactattcttaact

SEQ ID NO: 76367 - DNA, 40 bp, Homo sapiens
agttaagaatagtattctgggaatacacaggaagggctcc

SEQ ID NO: 76368 - DNA, 40 bp, Homo sapiens
gagcccttcctgtgtattcccagaatactattcttaacta

SEQ ID NO: 76369 - DNA, 40 bp, Homo sapiens
tagttaagaatagtattctgggaatacacaggaagggctc

SEQ ID NO: 76370 - DNA, 40 bp, Homo sapiens
agcccttcctgtgtattcccagaatactattcttaactat

SEQ ID NO: 76371 - DNA, 40 bp, Homo sapiens
atagttaagaatagtattctgggaatacacaggaagggct

SEQ ID NO: 76372 - DNA, 40 bp, Homo sapiens
gcccttcctgtgtattcccagaatactattcttaactatt

SEQ ID NO: 76373 - DNA, 40 bp, Homo sapiens
aatagttaagaatagtattctgggaatacacaggaagggc

SEQ ID NO: 76374 - DNA, 40 bp, Homo sapiens
cccttcctgtgtattcccagaatactattcttaactatta

SEQ ID NO: 76375 - DNA, 40 bp, Homo sapiens
taatagttaagaatagtattctgggaatacacaggaaggg

SEQ ID NO: 76376 - DNA, 40 bp, Homo sapiens
ccttcctgtgtattcccagaatactattcttaactattat

SEQ ID NO: 76377 - DNA, 40 bp, Homo sapiens
ataatagttaagaatagtattctgggaatacacaggaagg

SEQ ID NO: 76378 - DNA, 40 bp, Homo sapiens
cttcctgtgtattcccagaatactattcttaactattata

SEQ ID NO: 76379 - DNA, 40 bp, Homo sapiens
tataatagttaagaatagtattctgggaatacacaggaag

SEQ ID NO: 76380 - DNA, 40 bp, Homo sapiens
ttcctgtgtattcccagaatactattcttaactattatat

SEQ ID NO: 76381 - DNA, 40 bp, Homo sapiens
atataatagttaagaatagtattctgggaatacacaggaa

SEQ ID NO: 76382 - DNA, 40 bp, Homo sapiens
tcctgtgtattcccagaatactattcttaactattatatg

SEQ ID NO: 76383 - DNA, 40 bp, Homo sapiens
catataatagttaagaatagtattctgggaatacacagga

SEQ ID NO: 76384 - DNA, 40 bp, Homo sapiens
cctgtgtattcccagaatactattcttaactattatatgc

SEQ ID NO: 76385 - DNA, 40 bp, Homo sapiens
gcatataatagttaagaatagtattctgggaatacacagg

SEQ ID NO: 76386 - DNA, 40 bp, Homo sapiens
ctgtgtattcccagaatactattcttaactattatatgct

SEQ ID NO: 76387 - DNA, 40 bp, Homo sapiens
agcatataatagttaagaatagtattctgggaatacacag

SEQ ID NO: 76388 - DNA, 40 bp, Homo sapiens
tgtgtattcccagaatactattcttaactattatatgctt

SEQ ID NO: 76389 - DNA, 40 bp, Homo sapiens
aagcatataatagttaagaatagtattctgggaatacaca

SEQ ID NO: 76390 - DNA, 40 bp, Homo sapiens
gtgtattcccagaatactattcttaactattatatgcttc

SEQ ID NO: 76391 - DNA, 40 bp, Homo sapiens
gaagcatataatagttaagaatagtattctgggaatacac

SEQ ID NO: 76392 - DNA, 40 bp, Homo sapiens
tgtattcccagaatactattcttaactattatatgcttcc

SEQ ID NO: 76393 - DNA, 40 bp, Homo sapiens
ggaagcatataatagttaagaatagtattctgggaataca

SEQ ID NO: 76394 - DNA, 40 bp, Homo sapiens
gtattcccagaatactattcttaactattatatgcttccc

SEQ ID NO: 76395 - DNA, 40 bp, Homo sapiens
gggaagcatataatagttaagaatagtattctgggaatac

SEQ ID NO: 76396 - DNA, 40 bp, Homo sapiens
tattcccagaatactattcttaactattatatgcttccca

SEQ ID NO: 76397 - DNA, 40 bp, Homo sapiens
tgggaagcatataatagttaagaatagtattctgggaata

SEQ ID NO: 76398 - DNA, 40 bp, Homo sapiens
attcccagaatactattcttaactattatatgcttcccat

SEQ ID NO: 76399 - DNA, 40 bp, Homo sapiens
atgggaagcatataatagttaagaatagtattctgggaat

SEQ ID NO: 76400 - DNA, 40 bp, Homo sapiens
ttcccagaatactattcttaactattatatgcttcccatg

SEQ ID NO: 76401 - DNA, 40 bp, Homo sapiens
catgggaagcatataatagttaagaatagtattctgggaa

SEQ ID NO: 76402 - DNA, 40 bp, Homo sapiens
tcccagaatactattcttaactattatatgcttcccatgt

SEQ ID NO: 76403 - DNA, 40 bp, Homo sapiens
acatgggaagcatataatagttaagaatagtattctggga

SEQ ID NO: 76404 - DNA, 40 bp, Homo sapiens
cccagaatactattcttaactattatatgcttcccatgtt

SEQ ID NO: 76405 - DNA, 40 bp, Homo sapiens
aacatgggaagcatataatagttaagaatagtattctggg

SEQ ID NO: 76406 - DNA, 40 bp, Homo sapiens
ccagaatactattcttaactattatatgcttcccatgtta

SEQ ID NO: 76407 - DNA, 40 bp, Homo sapiens
taacatgggaagcatataatagttaagaatagtattctgg

SEQ ID NO: 76408 - DNA, 40 bp, Homo sapiens
cagaatactattcttaactattatatgcttcccatgttat

SEQ ID NO: 76409 - DNA, 40 bp, Homo sapiens
ataacatgggaagcatataatagttaagaatagtattctg

SEQ ID NO: 76410 - DNA, 40 bp, Homo sapiens
agaatactattcttaactattatatgcttcccatgttatg

SEQ ID NO: 76411 - DNA, 40 bp, Homo sapiens
cataacatgggaagcatataatagttaagaatagtattct

SEQ ID NO: 76412 - DNA, 40 bp, Homo sapiens
gaatactattcttaactattatatgcttcccatgttatgt

SEQ ID NO: 76413 - DNA, 40 bp, Homo sapiens
acataacatgggaagcatataatagttaagaatagtattc

SEQ ID NO: 76414 - DNA, 40 bp, Homo sapiens
aatactattcttaactattatatgcttcccatgttatgtt

SEQ ID NO: 76415 - DNA, 40 bp, Homo sapiens
aacataacatgggaagcatataatagttaagaatagtatt

SEQ ID NO: 76416 - DNA, 40 bp, Homo sapiens
atactattcttaactattatatgcttcccatgttatgttg

SEQ ID NO: 76417 - DNA, 40 bp, Homo sapiens
caacataacatgggaagcatataatagttaagaatagtat

SEQ ID NO: 76418 - DNA, 40 bp, Homo sapiens
tactattcttaactattatatgcttcccatgttatgttga

SEQ ID NO: 76419 - DNA, 40 bp, Homo sapiens
tcaacataacatgggaagcatataatagttaagaatagta

SEQ ID NO: 76420 - DNA, 40 bp, Homo sapiens
actattcttaactattatatgcttcccatgttatgttgaa

SEQ ID NO: 76421 - DNA, 40 bp, Homo sapiens
ttcaacataacatgggaagcatataatagttaagaatagt

SEQ ID NO: 76422 - DNA, 40 bp, Homo sapiens
ctattcttaactattatatgcttcccatgttatgttgaaa

SEQ ID NO: 76423 - DNA, 40 bp, Homo sapiens
tttcaacataacatgggaagcatataatagttaagaatag

SEQ ID NO: 76424 - DNA, 40 bp, Homo sapiens
tattcttaactattatatgcttcccatgttatgttgaaat

SEQ ID NO: 76425 - DNA, 40 bp, Homo sapiens
atttcaacataacatgggaagcatataatagttaagaata

SEQ ID NO: 76426 - DNA, 40 bp, Homo sapiens
attcttaactattatatgcttcccatgttatgttgaaata

SEQ ID NO: 76427 - DNA, 40 bp, Homo sapiens
tatttcaacataacatgggaagcatataatagttaagaat

SEQ ID NO: 76428 - DNA, 40 bp, Homo sapiens
ttcttaactattatatgcttcccatgttatgttgaaataa

SEQ ID NO: 76429 - DNA, 40 bp, Homo sapiens
ttatttcaacataacatgggaagcatataatagttaagaa

SEQ ID NO: 76430 - DNA, 40 bp, Homo sapiens
tcttaactattatatgcttcccatgttatgttgaaataac

SEQ ID NO: 76431 - DNA, 40 bp, Homo sapiens
gttatttcaacataacatgggaagcatataatagttaaga

SEQ ID NO: 76432 - DNA, 40 bp, Homo sapiens
cttaactattatatgcttcccatgttatgttgaaataact

SEQ ID NO: 76433 - DNA, 40 bp, Homo sapiens
agttatttcaacataacatgggaagcatataatagttaag

SEQ ID NO: 76434 - DNA, 40 bp, Homo sapiens
ttaactattatatgcttcccatgttatgttgaaataacta

SEQ ID NO: 76435 - DNA, 40 bp, Homo sapiens
tagttatttcaacataacatgggaagcatataatagttaa

SEQ ID NO: 76436 - DNA, 40 bp, Homo sapiens
taactattatatgcttcccatgttatgttgaaataactaa

SEQ ID NO: 76437 - DNA, 40 bp, Homo sapiens
ttagttatttcaacataacatgggaagcatataatagtta

SEQ ID NO: 76438 - DNA, 40 bp, Homo sapiens
aactattatatgcttcccatgttatgttgaaataactaac

SEQ ID NO: 76439 - DNA, 40 bp, Homo sapiens
gttagttatttcaacataacatgggaagcatataatagtt

SEQ ID NO: 76440 - DNA, 40 bp, Homo sapiens
actattatatgcttcccatgttatgttgaaataactaacc

SEQ ID NO: 76441 - DNA, 40 bp, Homo sapiens
ggttagttatttcaacataacatgggaagcatataatagt

SEQ ID NO: 76442 - DNA, 40 bp, Homo sapiens
ctattatatgcttcccatgttatgttgaaataactaacct

SEQ ID NO: 76443 - DNA, 40 bp, Homo sapiens
aggttagttatttcaacataacatgggaagcatataatag

SEQ ID NO: 76444 - DNA, 40 bp, Homo sapiens
tattatatgcttcccatgttatgttgaaataactaacctc

SEQ ID NO: 76445 - DNA, 40 bp, Homo sapiens
gaggttagttatttcaacataacatgggaagcatataata

SEQ ID NO: 76446 - DNA, 40 bp, Homo sapiens
attatatgcttcccatgttatgttgaaataactaacctct

SEQ ID NO: 76447 - DNA, 40 bp, Homo sapiens
agaggttagttatttcaacataacatgggaagcatataat

SEQ ID NO: 76448 - DNA, 40 bp, Homo sapiens
ttatatgcttcccatgttatgttgaaataactaacctctt

SEQ ID NO: 76449 - DNA, 40 bp, Homo sapiens
aagaggttagttatttcaacataacatgggaagcatataa

SEQ ID NO: 76450 - DNA, 40 bp, Homo sapiens
tatatgcttcccatgttatgttgaaataactaacctcttc

SEQ ID NO: 76451 - DNA, 40 bp, Homo sapiens
gaagaggttagttatttcaacataacatgggaagcatata

SEQ ID NO: 76452 - DNA, 40 bp, Homo sapiens
atatgcttcccatgttatgttgaaataactaacctcttct

SEQ ID NO: 76453 - DNA, 40 bp, Homo sapiens
agaagaggttagttatttcaacataacatgggaagcatat

SEQ ID NO: 76454 - DNA, 40 bp, Homo sapiens
tatgcttcccatgttatgttgaaataactaacctcttctg

SEQ ID NO: 76455 - DNA, 40 bp, Homo sapiens
cagaagaggttagttatttcaacataacatgggaagcata

SEQ ID NO: 76456 - DNA, 40 bp, Homo sapiens
atgcttcccatgttatgttgaaataactaacctcttctgt

SEQ ID NO: 76457 - DNA, 40 bp, Homo sapiens
acagaagaggttagttatttcaacataacatgggaagcat

SEQ ID NO: 76458 - DNA, 40 bp, Homo sapiens
tgcttcccatgttatgttgaaataactaacctcttctgtt

SEQ ID NO: 76459 - DNA, 40 bp, Homo sapiens
aacagaagaggttagttatttcaacataacatgggaagca

SEQ ID NO: 76460 - DNA, 40 bp, Homo sapiens
gcttcccatgttatgttgaaataactaacctcttctgttt

SEQ ID NO: 76461 - DNA, 40 bp, Homo sapiens
aaacagaagaggttagttatttcaacataacatgggaagc

SEQ ID NO: 76462 - DNA, 40 bp, Homo sapiens
cttcccatgttatgttgaaataactaacctcttctgtttc

SEQ ID NO: 76463 - DNA, 40 bp, Homo sapiens
gaaacagaagaggttagttatttcaacataacatgggaag

SEQ ID NO: 76464 - DNA, 40 bp, Homo sapiens
ttcccatgttatgttgaaataactaacctcttctgtttca

SEQ ID NO: 76465 - DNA, 40 bp, Homo sapiens
tgaaacagaagaggttagttatttcaacataacatgggaa

SEQ ID NO: 76466 - DNA, 40 bp, Homo sapiens
tcccatgttatgttgaaataactaacctcttctgtttcat

SEQ ID NO: 76467 - DNA, 40 bp, Homo sapiens
atgaaacagaagaggttagttatttcaacataacatggga

SEQ ID NO: 76468 - DNA, 40 bp, Homo sapiens
cccatgttatgttgaaataactaacctcttctgtttcatt

SEQ ID NO: 76469 - DNA, 40 bp, Homo sapiens
aatgaaacagaagaggttagttatttcaacataacatggg

SEQ ID NO: 76470 - DNA, 40 bp, Homo sapiens
ccatgttatgttgaaataactaacctcttctgtttcattc

SEQ ID NO: 76471 - DNA, 40 bp, Homo sapiens
gaatgaaacagaagaggttagttatttcaacataacatgg

SEQ ID NO: 76472 - DNA, 40 bp, Homo sapiens
catgttatgttgaaataactaacctcttctgtttcattcc

SEQ ID NO: 76473 - DNA, 40 bp, Homo sapiens
ggaatgaaacagaagaggttagttatttcaacataacatg

SEQ ID NO: 76474 - DNA, 40 bp, Homo sapiens
atgttatgttgaaataactaacctcttctgtttcattcct

SEQ ID NO: 76475 - DNA, 40 bp, Homo sapiens
aggaatgaaacagaagaggttagttatttcaacataacat

SEQ ID NO: 76476 - DNA, 40 bp, Homo sapiens
tgttatgttgaaataactaacctcttctgtttcattccta

SEQ ID NO: 76477 - DNA, 40 bp, Homo sapiens
taggaatgaaacagaagaggttagttatttcaacataaca

SEQ ID NO: 76478 - DNA, 40 bp, Homo sapiens
gttatgttgaaataactaacctcttctgtttcattcctat

SEQ ID NO: 76479 - DNA, 40 bp, Homo sapiens
ataggaatgaaacagaagaggttagttatttcaacataac

SEQ ID NO: 76480 - DNA, 40 bp, Homo sapiens
ttatgttgaaataactaacctcttctgtttcattcctata

SEQ ID NO: 76481 - DNA, 40 bp, Homo sapiens
tataggaatgaaacagaagaggttagttatttcaacataa

SEQ ID NO: 76482 - DNA, 40 bp, Homo sapiens
tatgttgaaataactaacctcttctgtttcattcctatat

SEQ ID NO: 76483 - DNA, 40 bp, Homo sapiens
atataggaatgaaacagaagaggttagttatttcaacata

SEQ ID NO: 76484 - DNA, 40 bp, Homo sapiens
atgttgaaataactaacctcttctgtttcattcctatatt

SEQ ID NO: 76485 - DNA, 40 bp, Homo sapiens
aatataggaatgaaacagaagaggttagttatttcaacat

SEQ ID NO: 76486 - DNA, 40 bp, Homo sapiens
tgttgaaataactaacctcttctgtttcattcctatatta

SEQ ID NO: 76487 - DNA, 40 bp, Homo sapiens
taatataggaatgaaacagaagaggttagttatttcaaca

SEQ ID NO: 76488 - DNA, 40 bp, Homo sapiens
gttgaaataactaacctcttctgtttcattcctatattac

SEQ ID NO: 76489 - DNA, 40 bp, Homo sapiens
gtaatataggaatgaaacagaagaggttagttatttcaac

SEQ ID NO: 76490 - DNA, 40 bp, Homo sapiens
ttgaaataactaacctcttctgtttcattcctatattact

SEQ ID NO: 76491 - DNA, 40 bp, Homo sapiens
agtaatataggaatgaaacagaagaggttagttatttcaa

SEQ ID NO: 76492 - DNA, 40 bp, Homo sapiens
tgaaataactaacctcttctgtttcattcctatattactt

SEQ ID NO: 76493 - DNA, 40 bp, Homo sapiens
aagtaatataggaatgaaacagaagaggttagttatttca

SEQ ID NO: 76494 - DNA, 40 bp, Homo sapiens
gaaataactaacctcttctgtttcattcctatattacttg

SEQ ID NO: 76495 - DNA, 40 bp, Homo sapiens
caagtaatataggaatgaaacagaagaggttagttatttc

SEQ ID NO: 76496 - DNA, 40 bp, Homo sapiens
aaataactaacctcttctgtttcattcctatattacttga

SEQ ID NO: 76497 - DNA, 40 bp, Homo sapiens
tcaagtaatataggaatgaaacagaagaggttagttattt

SEQ ID NO: 76498 - DNA, 40 bp, Homo sapiens
aataactaacctcttctgtttcattcctatattacttgac

SEQ ID NO: 76499 - DNA, 40 bp, Homo sapiens
gtcaagtaatataggaatgaaacagaagaggttagttatt

SEQ ID NO: 76500 - DNA, 40 bp, Homo sapiens
ataactaacctcttctgtttcattcctatattacttgaca

SEQ ID NO: 76501 - DNA, 40 bp, Homo sapiens
tgtcaagtaatataggaatgaaacagaagaggttagttat

SEQ ID NO: 76502 - DNA, 40 bp, Homo sapiens
taactaacctcttctgtttcattcctatattacttgacag

SEQ ID NO: 76503 - DNA, 40 bp, Homo sapiens
ctgtcaagtaatataggaatgaaacagaagaggttagtta

SEQ ID NO: 76504 - DNA, 40 bp, Homo sapiens
aactaacctcttctgtttcattcctatattacttgacagc

SEQ ID NO: 76505 - DNA, 40 bp, Homo sapiens
gctgtcaagtaatataggaatgaaacagaagaggttagtt

SEQ ID NO: 76506 - DNA, 40 bp, Homo sapiens
actaacctcttctgtttcattcctatattacttgacagca

SEQ ID NO: 76507 - DNA, 40 bp, Homo sapiens
tgctgtcaagtaatataggaatgaaacagaagaggttagt

SEQ ID NO: 76508 - DNA, 40 bp, Homo sapiens
ctaacctcttctgtttcattcctatattacttgacagcaa

SEQ ID NO: 76509 - DNA, 40 bp, Homo sapiens
ttgctgtcaagtaatataggaatgaaacagaagaggttag

SEQ ID NO: 76510 - DNA, 40 bp, Homo sapiens
taacctcttctgtttcattcctatattacttgacagcaaa

SEQ ID NO: 76511 - DNA, 40 bp, Homo sapiens
tttgctgtcaagtaatataggaatgaaacagaagaggtta

SEQ ID NO: 76512 - DNA, 40 bp, Homo sapiens
aacctcttctgtttcattcctatattacttgacagcaaaa

SEQ ID NO: 76513 - DNA, 40 bp, Homo sapiens
ttttgctgtcaagtaatataggaatgaaacagaagaggtt

SEQ ID NO: 76514 - DNA, 40 bp, Homo sapiens
acctcttctgtttcattcctatattacttgacagcaaaat

SEQ ID NO: 76515 - DNA, 40 bp, Homo sapiens
attttgctgtcaagtaatataggaatgaaacagaagaggt

SEQ ID NO: 76516 - DNA, 40 bp, Homo sapiens
cctcttctgtttcattcctatattacttgacagcaaaatc

SEQ ID NO: 76517 - DNA, 40 bp, Homo sapiens
gattttgctgtcaagtaatataggaatgaaacagaagagg

SEQ ID NO: 76518 - DNA, 40 bp, Homo sapiens
ctcttctgtttcattcctatattacttgacagcaaaatct

SEQ ID NO: 76519 - DNA, 40 bp, Homo sapiens
agattttgctgtcaagtaatataggaatgaaacagaagag

SEQ ID NO: 76520 - DNA, 40 bp, Homo sapiens
tcttctgtttcattcctatattacttgacagcaaaatctt

SEQ ID NO: 76521 - DNA, 40 bp, Homo sapiens
aagattttgctgtcaagtaatataggaatgaaacagaaga

SEQ ID NO: 76522 - DNA, 40 bp, Homo sapiens
cttctgtttcattcctatattacttgacagcaaaatctta

SEQ ID NO: 76523 - DNA, 40 bp, Homo sapiens
taagattttgctgtcaagtaatataggaatgaaacagaag

SEQ ID NO: 76524 - DNA, 40 bp, Homo sapiens
ttctgtttcattcctatattacttgacagcaaaatcttag

SEQ ID NO: 76525 - DNA, 40 bp, Homo sapiens
ctaagattttgctgtcaagtaatataggaatgaaacagaa

SEQ ID NO: 76526 - DNA, 40 bp, Homo sapiens
tctgtttcattcctatattacttgacagcaaaatcttagc

SEQ ID NO: 76527 - DNA, 40 bp, Homo sapiens
gctaagattttgctgtcaagtaatataggaatgaaacaga

SEQ ID NO: 76528 - DNA, 40 bp, Homo sapiens
ctgtttcattcctatattacttgacagcaaaatcttagcc

SEQ ID NO: 76529 - DNA, 40 bp, Homo sapiens
ggctaagattttgctgtcaagtaatataggaatgaaacag

SEQ ID NO: 76530 - DNA, 40 bp, Homo sapiens
tgtttcattcctatattacttgacagcaaaatcttagcca

SEQ ID NO: 76531 - DNA, 40 bp, Homo sapiens
tggctaagattttgctgtcaagtaatataggaatgaaaca

SEQ ID NO: 76532 - DNA, 40 bp, Homo sapiens
gtttcattcctatattacttgacagcaaaatcttagccag

SEQ ID NO: 76533 - DNA, 40 bp, Homo sapiens
ctggctaagattttgctgtcaagtaatataggaatgaaac

SEQ ID NO: 76534 - DNA, 40 bp, Homo sapiens
tttcattcctatattacttgacagcaaaatcttagccaga

SEQ ID NO: 76535 - DNA, 40 bp, Homo sapiens
tctggctaagattttgctgtcaagtaatataggaatgaaa

SEQ ID NO: 76536 - DNA, 40 bp, Homo sapiens
ttcattcctatattacttgacagcaaaatcttagccagaa

SEQ ID NO: 76537 - DNA, 40 bp, Homo sapiens
ttctggctaagattttgctgtcaagtaatataggaatgaa

SEQ ID NO: 76538 - DNA, 40 bp, Homo sapiens
tcattcctatattacttgacagcaaaatcttagccagaat

SEQ ID NO: 76539 - DNA, 40 bp, Homo sapiens
attctggctaagattttgctgtcaagtaatataggaatga

SEQ ID NO: 76540 - DNA, 40 bp, Homo sapiens
cattcctatattacttgacagcaaaatcttagccagaatt

SEQ ID NO: 76541 - DNA, 40 bp, Homo sapiens
aattctggctaagattttgctgtcaagtaatataggaatg

SEQ ID NO: 76542 - DNA, 40 bp, Homo sapiens
attcctatattacttgacagcaaaatcttagccagaatta

SEQ ID NO: 76543 - DNA, 40 bp, Homo sapiens
taattctggctaagattttgctgtcaagtaatataggaat

SEQ ID NO: 76544 - DNA, 40 bp, Homo sapiens
ttcctatattacttgacagcaaaatcttagccagaattac

SEQ ID NO: 76545 - DNA, 40 bp, Homo sapiens
gtaattctggctaagattttgctgtcaagtaatataggaa

SEQ ID NO: 76546 - DNA, 40 bp, Homo sapiens
tcctatattacttgacagcaaaatcttagccagaattaca

SEQ ID NO: 76547 - DNA, 40 bp, Homo sapiens
tgtaattctggctaagattttgctgtcaagtaatatagga

SEQ ID NO: 76548 - DNA, 40 bp, Homo sapiens
cctatattacttgacagcaaaatcttagccagaattacat

SEQ ID NO: 76549 - DNA, 40 bp, Homo sapiens
atgtaattctggctaagattttgctgtcaagtaatatagg

SEQ ID NO: 76550 - DNA, 40 bp, Homo sapiens
ctatattacttgacagcaaaatcttagccagaattacata

SEQ ID NO: 76551 - DNA, 40 bp, Homo sapiens
tatgtaattctggctaagattttgctgtcaagtaatatag

SEQ ID NO: 76552 - DNA, 40 bp, Homo sapiens
tatattacttgacagcaaaatcttagccagaattacatat

SEQ ID NO: 76553 - DNA, 40 bp, Homo sapiens
atatgtaattctggctaagattttgctgtcaagtaatata

SEQ ID NO: 76554 - DNA, 40 bp, Homo sapiens
atattacttgacagcaaaatcttagccagaattacatatt

SEQ ID NO: 76555 - DNA, 40 bp, Homo sapiens
aatatgtaattctggctaagattttgctgtcaagtaatat

SEQ ID NO: 76556 - DNA, 40 bp, Homo sapiens
tattacttgacagcaaaatcttagccagaattacatattt

SEQ ID NO: 76557 - DNA, 40 bp, Homo sapiens
aaatatgtaattctggctaagattttgctgtcaagtaata

SEQ ID NO: 76558 - DNA, 40 bp, Homo sapiens
attacttgacagcaaaatcttagccagaattacatatttt

SEQ ID NO: 76559 - DNA, 40 bp, Homo sapiens
aaaatatgtaattctggctaagattttgctgtcaagtaat

SEQ ID NO: 76560 - DNA, 40 bp, Homo sapiens
ttacttgacagcaaaatcttagccagaattacatattttt

SEQ ID NO: 76561 - DNA, 40 bp, Homo sapiens
aaaaatatgtaattctggctaagattttgctgtcaagtaa

SEQ ID NO: 76562 - DNA, 40 bp, Homo sapiens
tacttgacagcaaaatcttagccagaattacatattttta

SEQ ID NO: 76563 - DNA, 40 bp, Homo sapiens
taaaaatatgtaattctggctaagattttgctgtcaagta

SEQ ID NO: 76564 - DNA, 40 bp, Homo sapiens
acttgacagcaaaatcttagccagaattacatatttttaa

SEQ ID NO: 76565 - DNA, 40 bp, Homo sapiens
ttaaaaatatgtaattctggctaagattttgctgtcaagt

SEQ ID NO: 76566 - DNA, 40 bp, Homo sapiens
cttgacagcaaaatcttagccagaattacatatttttaat

SEQ ID NO: 76567 - DNA, 40 bp, Homo sapiens
attaaaaatatgtaattctggctaagattttgctgtcaag

SEQ ID NO: 76568 - DNA, 40 bp, Homo sapiens
ttgacagcaaaatcttagccagaattacatatttttaatc

SEQ ID NO: 76569 - DNA, 40 bp, Homo sapiens
gattaaaaatatgtaattctggctaagattttgctgtcaa

SEQ ID NO: 76570 - DNA, 40 bp, Homo sapiens
tgacagcaaaatcttagccagaattacatatttttaatct

SEQ ID NO: 76571 - DNA, 40 bp, Homo sapiens
agattaaaaatatgtaattctggctaagattttgctgtca

SEQ ID NO: 76572 - DNA, 40 bp, Homo sapiens
gacagcaaaatcttagccagaattacatatttttaatctt

SEQ ID NO: 76573 - DNA, 40 bp, Homo sapiens
aagattaaaaatatgtaattctggctaagattttgctgtc

SEQ ID NO: 76574 - DNA, 40 bp, Homo sapiens
acagcaaaatcttagccagaattacatatttttaatcttt

SEQ ID NO: 76575 - DNA, 40 bp, Homo sapiens
aaagattaaaaatatgtaattctggctaagattttgctgt

SEQ ID NO: 76576 - DNA, 40 bp, Homo sapiens
cagcaaaatcttagccagaattacatatttttaatctttg

SEQ ID NO: 76577 - DNA, 40 bp, Homo sapiens
caaagattaaaaatatgtaattctggctaagattttgctg

SEQ ID NO: 76578 - DNA, 40 bp, Homo sapiens
agcaaaatcttagccagaattacatatttttaatctttgc

SEQ ID NO: 76579 - DNA, 40 bp, Homo sapiens
gcaaagattaaaaatatgtaattctggctaagattttgct

SEQ ID NO: 76580 - DNA, 40 bp, Homo sapiens
gcaaaatcttagccagaattacatatttttaatctttgca

SEQ ID NO: 76581 - DNA, 40 bp, Homo sapiens
tgcaaagattaaaaatatgtaattctggctaagattttgc

SEQ ID NO: 76582 - DNA, 40 bp, Homo sapiens
caaaatcttagccagaattacatatttttaatctttgcac

SEQ ID NO: 76583 - DNA, 40 bp, Homo sapiens
gtgcaaagattaaaaatatgtaattctggctaagattttg

SEQ ID NO: 76584 - DNA, 40 bp, Homo sapiens
aaaatcttagccagaattacatatttttaatctttgcaca

SEQ ID NO: 76585 - DNA, 40 bp, Homo sapiens
tgtgcaaagattaaaaatatgtaattctggctaagatttt

SEQ ID NO: 76586 - DNA, 40 bp, Homo sapiens
aaatcttagccagaattacatatttttaatctttgcacac

SEQ ID NO: 76587 - DNA, 40 bp, Homo sapiens
gtgtgcaaagattaaaaatatgtaattctggctaagattt

SEQ ID NO: 76588 - DNA, 40 bp, Homo sapiens
aatcttagccagaattacatatttttaatctttgcacacc

SEQ ID NO: 76589 - DNA, 40 bp, Homo sapiens
ggtgtgcaaagattaaaaatatgtaattctggctaagatt

SEQ ID NO: 76590 - DNA, 40 bp, Homo sapiens
atcttagccagaattacatatttttaatctttgcacaccc

SEQ ID NO: 76591 - DNA, 40 bp, Homo sapiens
gggtgtgcaaagattaaaaatatgtaattctggctaagat

SEQ ID NO: 76592 - DNA, 40 bp, Homo sapiens
tcttagccagaattacatatttttaatctttgcacaccca

SEQ ID NO: 76593 - DNA, 40 bp, Homo sapiens
tgggtgtgcaaagattaaaaatatgtaattctggctaaga

SEQ ID NO: 76594 - DNA, 40 bp, Homo sapiens
cttagccagaattacatatttttaatctttgcacacccat

SEQ ID NO: 76595 - DNA, 40 bp, Homo sapiens
atgggtgtgcaaagattaaaaatatgtaattctggctaag

SEQ ID NO: 76596 - DNA, 40 bp, Homo sapiens
ttagccagaattacatatttttaatctttgcacacccatt

SEQ ID NO: 76597 - DNA, 40 bp, Homo sapiens
aatgggtgtgcaaagattaaaaatatgtaattctggctaa

SEQ ID NO: 76598 - DNA, 40 bp, Homo sapiens
tagccagaattacatatttttaatctttgcacacccattg

SEQ ID NO: 76599 - DNA, 40 bp, Homo sapiens
caatgggtgtgcaaagattaaaaatatgtaattctggcta

SEQ ID NO: 76600 - DNA, 40 bp, Homo sapiens
agccagaattacatatttttaatctttgcacacccattgc

SEQ ID NO: 76601 - DNA, 40 bp, Homo sapiens
gcaatgggtgtgcaaagattaaaaatatgtaattctggct

SEQ ID NO: 76602 - DNA, 40 bp, Homo sapiens
gccagaattacatatttttaatctttgcacacccattgcc

SEQ ID NO: 76603 - DNA, 40 bp, Homo sapiens
ggcaatgggtgtgcaaagattaaaaatatgtaattctggc

SEQ ID NO: 76604 - DNA, 40 bp, Homo sapiens
ccagaattacatatttttaatctttgcacacccattgcct

SEQ ID NO: 76605 - DNA, 40 bp, Homo sapiens
aggcaatgggtgtgcaaagattaaaaatatgtaattctgg

SEQ ID NO: 76606 - DNA, 40 bp, Homo sapiens
cagaattacatatttttaatctttgcacacccattgccta

SEQ ID NO: 76607 - DNA, 40 bp, Homo sapiens
taggcaatgggtgtgcaaagattaaaaatatgtaattctg

SEQ ID NO: 76608 - DNA, 40 bp, Homo sapiens
agaattacatatttttaatctttgcacacccattgcctag

SEQ ID NO: 76609 - DNA, 40 bp, Homo sapiens
ctaggcaatgggtgtgcaaagattaaaaatatgtaattct

SEQ ID NO: 76610 - DNA, 40 bp, Homo sapiens
gaattacatatttttaatctttgcacacccattgcctagt

SEQ ID NO: 76611 - DNA, 40 bp, Homo sapiens
actaggcaatgggtgtgcaaagattaaaaatatgtaattc

SEQ ID NO: 76612 - DNA, 40 bp, Homo sapiens
aattacatatttttaatctttgcacacccattgcctagta

SEQ ID NO: 76613 - DNA, 40 bp, Homo sapiens
tactaggcaatgggtgtgcaaagattaaaaatatgtaatt

SEQ ID NO: 76614 - DNA, 40 bp, Homo sapiens
attacatatttttaatctttgcacacccattgcctagtaa

SEQ ID NO: 76615 - DNA, 40 bp, Homo sapiens
ttactaggcaatgggtgtgcaaagattaaaaatatgtaat

SEQ ID NO: 76616 - DNA, 40 bp, Homo sapiens
ttacatatttttaatctttgcacacccattgcctagtaag

SEQ ID NO: 76617 - DNA, 40 bp, Homo sapiens
cttactaggcaatgggtgtgcaaagattaaaaatatgtaa

SEQ ID NO: 76618 - DNA, 40 bp, Homo sapiens
tacatatttttaatctttgcacacccattgcctagtaagg

SEQ ID NO: 76619 - DNA, 40 bp, Homo sapiens
ccttactaggcaatgggtgtgcaaagattaaaaatatgta

SEQ ID NO: 76620 - DNA, 40 bp, Homo sapiens
acatatttttaatctttgcacacccattgcctagtaaggt

SEQ ID NO: 76621 - DNA, 40 bp, Homo sapiens
accttactaggcaatgggtgtgcaaagattaaaaatatgt

SEQ ID NO: 76622 - DNA, 40 bp, Homo sapiens
catatttttaatctttgcacacccattgcctagtaaggtt

SEQ ID NO: 76623 - DNA, 40 bp, Homo sapiens
aaccttactaggcaatgggtgtgcaaagattaaaaatatg

SEQ ID NO: 76624 - DNA, 40 bp, Homo sapiens
atatttttaatctttgcacacccattgcctagtaaggttc

SEQ ID NO: 76625 - DNA, 40 bp, Homo sapiens
gaaccttactaggcaatgggtgtgcaaagattaaaaatat

SEQ ID NO: 76626 - DNA, 40 bp, Homo sapiens
tatttttaatctttgcacacccattgcctagtaaggttcc

SEQ ID NO: 76627 - DNA, 40 bp, Homo sapiens
ggaaccttactaggcaatgggtgtgcaaagattaaaaata

SEQ ID NO: 76628 - DNA, 40 bp, Homo sapiens
atttttaatctttgcacacccattgcctagtaaggttcct

SEQ ID NO: 76629 - DNA, 40 bp, Homo sapiens
aggaaccttactaggcaatgggtgtgcaaagattaaaaat

SEQ ID NO: 76630 - DNA, 40 bp, Homo sapiens
tttttaatctttgcacacccattgcctagtaaggttcctg

SEQ ID NO: 76631 - DNA, 40 bp, Homo sapiens
caggaaccttactaggcaatgggtgtgcaaagattaaaaa

SEQ ID NO: 76632 - DNA, 40 bp, Homo sapiens
ttttaatctttgcacacccattgcctagtaaggttcctgg

SEQ ID NO: 76633 - DNA, 40 bp, Homo sapiens
ccaggaaccttactaggcaatgggtgtgcaaagattaaaa

SEQ ID NO: 76634 - DNA, 40 bp, Homo sapiens
tttaatctttgcacacccattgcctagtaaggttcctggg

SEQ ID NO: 76635 - DNA, 40 bp, Homo sapiens
cccaggaaccttactaggcaatgggtgtgcaaagattaaa

SEQ ID NO: 76636 - DNA, 40 bp, Homo sapiens
ttaatctttgcacacccattgcctagtaaggttcctggga

SEQ ID NO: 76637 - DNA, 40 bp, Homo sapiens
tcccaggaaccttactaggcaatgggtgtgcaaagattaa

SEQ ID NO: 76638 - DNA, 40 bp, Homo sapiens
taatctttgcacacccattgcctagtaaggttcctgggac

SEQ ID NO: 76639 - DNA, 40 bp, Homo sapiens
gtcccaggaaccttactaggcaatgggtgtgcaaagatta

SEQ ID NO: 76640 - DNA, 40 bp, Homo sapiens
aatctttgcacacccattgcctagtaaggttcctgggaca

SEQ ID NO: 76641 - DNA, 40 bp, Homo sapiens
tgtcccaggaaccttactaggcaatgggtgtgcaaagatt

SEQ ID NO: 76642 - DNA, 40 bp, Homo sapiens
atctttgcacacccattgcctagtaaggttcctgggacat

SEQ ID NO: 76643 - DNA, 40 bp, Homo sapiens
atgtcccaggaaccttactaggcaatgggtgtgcaaagat

SEQ ID NO: 76644 - DNA, 40 bp, Homo sapiens
tctttgcacacccattgcctagtaaggttcctgggacata

SEQ ID NO: 76645 - DNA, 40 bp, Homo sapiens
tatgtcccaggaaccttactaggcaatgggtgtgcaaaga

SEQ ID NO: 76646 - DNA, 40 bp, Homo sapiens
ctttgcacacccattgcctagtaaggttcctgggacatag

SEQ ID NO: 76647 - DNA, 40 bp, Homo sapiens
ctatgtcccaggaaccttactaggcaatgggtgtgcaaag

SEQ ID NO: 76648 - DNA, 40 bp, Homo sapiens
tttgcacacccattgcctagtaaggttcctgggacatagt

SEQ ID NO: 76649 - DNA, 40 bp, Homo sapiens
actatgtcccaggaaccttactaggcaatgggtgtgcaaa

SEQ ID NO: 76650 - DNA, 40 bp, Homo sapiens
ttgcacacccattgcctagtaaggttcctgggacatagta

SEQ ID NO: 76651 - DNA, 40 bp, Homo sapiens
tactatgtcccaggaaccttactaggcaatgggtgtgcaa

SEQ ID NO: 76652 - DNA, 40 bp, Homo sapiens
tgcacacccattgcctagtaaggttcctgggacatagtaa

SEQ ID NO: 76653 - DNA, 40 bp, Homo sapiens
ttactatgtcccaggaaccttactaggcaatgggtgtgca

SEQ ID NO: 76654 - DNA, 40 bp, Homo sapiens
gcacacccattgcctagtaaggttcctgggacatagtaac

SEQ ID NO: 76655 - DNA, 40 bp, Homo sapiens
gttactatgtcccaggaaccttactaggcaatgggtgtgc

SEQ ID NO: 76656 - DNA, 40 bp, Homo sapiens
cacacccattgcctagtaaggttcctgggacatagtaact

SEQ ID NO: 76657 - DNA, 40 bp, Homo sapiens
agttactatgtcccaggaaccttactaggcaatgggtgtg

SEQ ID NO: 76658 - DNA, 40 bp, Homo sapiens
acacccattgcctagtaaggttcctgggacatagtaacta

SEQ ID NO: 76659 - DNA, 40 bp, Homo sapiens
tagttactatgtcccaggaaccttactaggcaatgggtgt

SEQ ID NO: 76660 - DNA, 40 bp, Homo sapiens
cacccattgcctagtaaggttcctgggacatagtaactac

SEQ ID NO: 76661 - DNA, 40 bp, Homo sapiens
gtagttactatgtcccaggaaccttactaggcaatgggtg

SEQ ID NO: 76662 - DNA, 40 bp, Homo sapiens
acccattgcctagtaaggttcctgggacatagtaactacc

SEQ ID NO: 76663 - DNA, 40 bp, Homo sapiens
ggtagttactatgtcccaggaaccttactaggcaatgggt

SEQ ID NO: 76664 - DNA, 40 bp, Homo sapiens
cccattgcctagtaaggttcctgggacatagtaactaccc

SEQ ID NO: 76665 - DNA, 40 bp, Homo sapiens
gggtagttactatgtcccaggaaccttactaggcaatggg

SEQ ID NO: 76666 - DNA, 40 bp, Homo sapiens
ccattgcctagtaaggttcctgggacatagtaactaccca

SEQ ID NO: 76667 - DNA, 40 bp, Homo sapiens
tgggtagttactatgtcccaggaaccttactaggcaatgg

SEQ ID NO: 76668 - DNA, 40 bp, Homo sapiens
cattgcctagtaaggttcctgggacatagtaactacccag

SEQ ID NO: 76669 - DNA, 40 bp, Homo sapiens
ctgggtagttactatgtcccaggaaccttactaggcaatg

SEQ ID NO: 76670 - DNA, 40 bp, Homo sapiens
attgcctagtaaggttcctgggacatagtaactacccagt

SEQ ID NO: 76671 - DNA, 40 bp, Homo sapiens
actgggtagttactatgtcccaggaaccttactaggcaat

SEQ ID NO: 76672 - DNA, 40 bp, Homo sapiens
ttgcctagtaaggttcctgggacatagtaactacccagta

SEQ ID NO: 76673 - DNA, 40 bp, Homo sapiens
tactgggtagttactatgtcccaggaaccttactaggcaa

SEQ ID NO: 76674 - DNA, 40 bp, Homo sapiens
tgcctagtaaggttcctgggacatagtaactacccagtaa

SEQ ID NO: 76675 - DNA, 40 bp, Homo sapiens
ttactgggtagttactatgtcccaggaaccttactaggca

SEQ ID NO: 76676 - DNA, 40 bp, Homo sapiens
gcctagtaaggttcctgggacatagtaactacccagtaaa

SEQ ID NO: 76677 - DNA, 40 bp, Homo sapiens
tttactgggtagttactatgtcccaggaaccttactaggc

SEQ ID NO: 76678 - DNA, 40 bp, Homo sapiens
cctagtaaggttcctgggacatagtaactacccagtaaat

SEQ ID NO: 76679 - DNA, 40 bp, Homo sapiens
atttactgggtagttactatgtcccaggaaccttactagg

SEQ ID NO: 76680 - DNA, 40 bp, Homo sapiens
ctagtaaggttcctgggacatagtaactacccagtaaata

SEQ ID NO: 76681 - DNA, 40 bp, Homo sapiens
tatttactgggtagttactatgtcccaggaaccttactag

SEQ ID NO: 76682 - DNA, 40 bp, Homo sapiens
tagtaaggttcctgggacatagtaactacccagtaaatat

SEQ ID NO: 76683 - DNA, 40 bp, Homo sapiens
atatttactgggtagttactatgtcccaggaaccttacta

SEQ ID NO: 76684 - DNA, 40 bp, Homo sapiens
agtaaggttcctgggacatagtaactacccagtaaatatt

SEQ ID NO: 76685 - DNA, 40 bp, Homo sapiens
aatatttactgggtagttactatgtcccaggaaccttact

SEQ ID NO: 76686 - DNA, 40 bp, Homo sapiens
gtaaggttcctgggacatagtaactacccagtaaatattt

SEQ ID NO: 76687 - DNA, 40 bp, Homo sapiens
aaatatttactgggtagttactatgtcccaggaaccttac

SEQ ID NO: 76688 - DNA, 40 bp, Homo sapiens
taaggttcctgggacatagtaactacccagtaaatattta

SEQ ID NO: 76689 - DNA, 40 bp, Homo sapiens
taaatatttactgggtagttactatgtcccaggaacctta

SEQ ID NO: 76690 - DNA, 40 bp, Homo sapiens
aaggttcctgggacatagtaactacccagtaaatatttat

SEQ ID NO: 76691 - DNA, 40 bp, Homo sapiens
ataaatatttactgggtagttactatgtcccaggaacctt

SEQ ID NO: 76692 - DNA, 40 bp, Homo sapiens
aggttcctgggacatagtaactacccagtaaatatttatt

SEQ ID NO: 76693 - DNA, 40 bp, Homo sapiens
aataaatatttactgggtagttactatgtcccaggaacct

SEQ ID NO: 76694 - DNA, 40 bp, Homo sapiens
ggttcctgggacatagtaactacccagtaaatatttattg

SEQ ID NO: 76695 - DNA, 40 bp, Homo sapiens
caataaatatttactgggtagttactatgtcccaggaacc

SEQ ID NO: 76696 - DNA, 40 bp, Homo sapiens
gttcctgggacatagtaactacccagtaaatatttattgc

SEQ ID NO: 76697 - DNA, 40 bp, Homo sapiens
gcaataaatatttactgggtagttactatgtcccaggaac

SEQ ID NO: 76698 - DNA, 40 bp, Homo sapiens
ttcctgggacatagtaactacccagtaaatatttattgcg

SEQ ID NO: 76699 - DNA, 40 bp, Homo sapiens
cgcaataaatatttactgggtagttactatgtcccaggaa

SEQ ID NO: 76700 - DNA, 40 bp, Homo sapiens
tcctgggacatagtaactacccagtaaatatttattgcgt

SEQ ID NO: 76701 - DNA, 40 bp, Homo sapiens
acgcaataaatatttactgggtagttactatgtcccagga

SEQ ID NO: 76702 - DNA, 40 bp, Homo sapiens
cctgggacatagtaactacccagtaaatatttattgcgtg

SEQ ID NO: 76703 - DNA, 40 bp, Homo sapiens
cacgcaataaatatttactgggtagttactatgtcccagg

SEQ ID NO: 76704 - DNA, 40 bp, Homo sapiens
ctgggacatagtaactacccagtaaatatttattgcgtgg

SEQ ID NO: 76705 - DNA, 40 bp, Homo sapiens
ccacgcaataaatatttactgggtagttactatgtcccag

SEQ ID NO: 76706 - DNA, 40 bp, Homo sapiens
tgggacatagtaactacccagtaaatatttattgcgtgga

SEQ ID NO: 76707 - DNA, 40 bp, Homo sapiens
tccacgcaataaatatttactgggtagttactatgtccca

SEQ ID NO: 76708 - DNA, 40 bp, Homo sapiens
gggacatagtaactacccagtaaatatttattgcgtggaa

SEQ ID NO: 76709 - DNA, 40 bp, Homo sapiens
ttccacgcaataaatatttactgggtagttactatgtccc

SEQ ID NO: 76710 - DNA, 40 bp, Homo sapiens
ggacatagtaactacccagtaaatatttattgcgtggaat

SEQ ID NO: 76711 - DNA, 40 bp, Homo sapiens
attccacgcaataaatatttactgggtagttactatgtcc

SEQ ID NO: 76712 - DNA, 40 bp, Homo sapiens
gacatagtaactacccagtaaatatttattgcgtggaatt

SEQ ID NO: 76713 - DNA, 40 bp, Homo sapiens
aattccacgcaataaatatttactgggtagttactatgtc

SEQ ID NO: 76714 - DNA, 40 bp, Homo sapiens
acatagtaactacccagtaaatatttattgcgtggaattc

SEQ ID NO: 76715 - DNA, 40 bp, Homo sapiens
gaattccacgcaataaatatttactgggtagttactatgt

SEQ ID NO: 76716 - DNA, 40 bp, Homo sapiens
catagtaactacccagtaaatatttattgcgtggaattct

SEQ ID NO: 76717 - DNA, 40 bp, Homo sapiens
agaattccacgcaataaatatttactgggtagttactatg

SEQ ID NO: 76718 - DNA, 40 bp, Homo sapiens
atagtaactacccagtaaatatttattgcgtggaattctc

SEQ ID NO: 76719 - DNA, 40 bp, Homo sapiens
gagaattccacgcaataaatatttactgggtagttactat

SEQ ID NO: 76720 - DNA, 40 bp, Homo sapiens
tagtaactacccagtaaatatttattgcgtggaattctca

SEQ ID NO: 76721 - DNA, 40 bp, Homo sapiens
tgagaattccacgcaataaatatttactgggtagttacta

SEQ ID NO: 76722 - DNA, 40 bp, Homo sapiens
agtaactacccagtaaatatttattgcgtggaattctcat

SEQ ID NO: 76723 - DNA, 40 bp, Homo sapiens
atgagaattccacgcaataaatatttactgggtagttact

SEQ ID NO: 76724 - DNA, 40 bp, Homo sapiens
gtaactacccagtaaatatttattgcgtggaattctcatt

SEQ ID NO: 76725 - DNA, 40 bp, Homo sapiens
aatgagaattccacgcaataaatatttactgggtagttac

SEQ ID NO: 76726 - DNA, 40 bp, Homo sapiens
taactacccagtaaatatttattgcgtggaattctcattt

SEQ ID NO: 76727 - DNA, 40 bp, Homo sapiens
aaatgagaattccacgcaataaatatttactgggtagtta

SEQ ID NO: 76728 - DNA, 40 bp, Homo sapiens
aactacccagtaaatatttattgcgtggaattctcatttt

SEQ ID NO: 76729 - DNA, 40 bp, Homo sapiens
aaaatgagaattccacgcaataaatatttactgggtagtt

SEQ ID NO: 76730 - DNA, 40 bp, Homo sapiens
actacccagtaaatatttattgcgtggaattctcattttc

SEQ ID NO: 76731 - DNA, 40 bp, Homo sapiens
gaaaatgagaattccacgcaataaatatttactgggtagt

SEQ ID NO: 76732 - DNA, 40 bp, Homo sapiens
ctacccagtaaatatttattgcgtggaattctcattttcg

SEQ ID NO: 76733 - DNA, 40 bp, Homo sapiens
cgaaaatgagaattccacgcaataaatatttactgggtag

SEQ ID NO: 76734 - DNA, 40 bp, Homo sapiens
tacccagtaaatatttattgcgtggaattctcattttcgt

SEQ ID NO: 76735 - DNA, 40 bp, Homo sapiens
acgaaaatgagaattccacgcaataaatatttactgggta

SEQ ID NO: 76736 - DNA, 40 bp, Homo sapiens
acccagtaaatatttattgcgtggaattctcattttcgtt

SEQ ID NO: 76737 - DNA, 40 bp, Homo sapiens
aacgaaaatgagaattccacgcaataaatatttactgggt

SEQ ID NO: 76738 - DNA, 40 bp, Homo sapiens
cccagtaaatatttattgcgtggaattctcattttcgttt

SEQ ID NO: 76739 - DNA, 40 bp, Homo sapiens
aaacgaaaatgagaattccacgcaataaatatttactggg

SEQ ID NO: 76740 - DNA, 40 bp, Homo sapiens
ccagtaaatatttattgcgtggaattctcattttcgtttc

SEQ ID NO: 76741 - DNA, 40 bp, Homo sapiens
gaaacgaaaatgagaattccacgcaataaatatttactgg

SEQ ID NO: 76742 - DNA, 40 bp, Homo sapiens
cagtaaatatttattgcgtggaattctcattttcgtttct

SEQ ID NO: 76743 - DNA, 40 bp, Homo sapiens
agaaacgaaaatgagaattccacgcaataaatatttactg

SEQ ID NO: 76744 - DNA, 40 bp, Homo sapiens
agtaaatatttattgcgtggaattctcattttcgtttcta

SEQ ID NO: 76745 - DNA, 40 bp, Homo sapiens
tagaaacgaaaatgagaattccacgcaataaatatttact

SEQ ID NO: 76746 - DNA, 40 bp, Homo sapiens
gtaaatatttattgcgtggaattctcattttcgtttctaa

SEQ ID NO: 76747 - DNA, 40 bp, Homo sapiens
ttagaaacgaaaatgagaattccacgcaataaatatttac

SEQ ID NO: 76748 - DNA, 40 bp, Homo sapiens
taaatatttattgcgtggaattctcattttcgtttctaaa

SEQ ID NO: 76749 - DNA, 40 bp, Homo sapiens
tttagaaacgaaaatgagaattccacgcaataaatattta

SEQ ID NO: 76750 - DNA, 40 bp, Homo sapiens
aaatatttattgcgtggaattctcattttcgtttctaaac

SEQ ID NO: 76751 - DNA, 40 bp, Homo sapiens
gtttagaaacgaaaatgagaattccacgcaataaatattt

SEQ ID NO: 76752 - DNA, 40 bp, Homo sapiens
aatatttattgcgtggaattctcattttcgtttctaaacc

SEQ ID NO: 76753 - DNA, 40 bp, Homo sapiens
ggtttagaaacgaaaatgagaattccacgcaataaatatt

SEQ ID NO: 76754 - DNA, 40 bp, Homo sapiens
atatttattgcgtggaattctcattttcgtttctaaaccc

SEQ ID NO: 76755 - DNA, 40 bp, Homo sapiens
gggtttagaaacgaaaatgagaattccacgcaataaatat

SEQ ID NO: 76756 - DNA, 40 bp, Homo sapiens
tatttattgcgtggaattctcattttcgtttctaaacccg

SEQ ID NO: 76757 - DNA, 40 bp, Homo sapiens
cgggtttagaaacgaaaatgagaattccacgcaataaata

SEQ ID NO: 76758 - DNA, 40 bp, Homo sapiens
atttattgcgtggaattctcattttcgtttctaaacccgt

SEQ ID NO: 76759 - DNA, 40 bp, Homo sapiens
acgggtttagaaacgaaaatgagaattccacgcaataaat

SEQ ID NO: 76760 - DNA, 40 bp, Homo sapiens
tttattgcgtggaattctcattttcgtttctaaacccgta

SEQ ID NO: 76761 - DNA, 40 bp, Homo sapiens
tacgggtttagaaacgaaaatgagaattccacgcaataaa

SEQ ID NO: 76762 - DNA, 40 bp, Homo sapiens
ttattgcgtggaattctcattttcgtttctaaacccgtat

SEQ ID NO: 76763 - DNA, 40 bp, Homo sapiens
atacgggtttagaaacgaaaatgagaattccacgcaataa

SEQ ID NO: 76764 - DNA, 40 bp, Homo sapiens
tattgcgtggaattctcattttcgtttctaaacccgtatt

SEQ ID NO: 76765 - DNA, 40 bp, Homo sapiens
aatacgggtttagaaacgaaaatgagaattccacgcaata

SEQ ID NO: 76766 - DNA, 40 bp, Homo sapiens
attgcgtggaattctcattttcgtttctaaacccgtatta

SEQ ID NO: 76767 - DNA, 40 bp, Homo sapiens
taatacgggtttagaaacgaaaatgagaattccacgcaat

SEQ ID NO: 76768 - DNA, 40 bp, Homo sapiens
ttgcgtggaattctcattttcgtttctaaacccgtattaa

SEQ ID NO: 76769 - DNA, 40 bp, Homo sapiens
ttaatacgggtttagaaacgaaaatgagaattccacgcaa

SEQ ID NO: 76770 - DNA, 40 bp, Homo sapiens
tgcgtggaattctcattttcgtttctaaacccgtattaaa

SEQ ID NO: 76771 - DNA, 40 bp, Homo sapiens
tttaatacgggtttagaaacgaaaatgagaattccacgca

SEQ ID NO: 76772 - DNA, 40 bp, Homo sapiens
gcgtggaattctcattttcgtttctaaacccgtattaaac

SEQ ID NO: 76773 - DNA, 40 bp, Homo sapiens
gtttaatacgggtttagaaacgaaaatgagaattccacgc

SEQ ID NO: 76774 - DNA, 40 bp, Homo sapiens
cgtggaattctcattttcgtttctaaacccgtattaaact

SEQ ID NO: 76775 - DNA, 40 bp, Homo sapiens
agtttaatacgggtttagaaacgaaaatgagaattccacg

SEQ ID NO: 76776 - DNA, 40 bp, Homo sapiens
gtggaattctcattttcgtttctaaacccgtattaaactc

SEQ ID NO: 76777 - DNA, 40 bp, Homo sapiens
gagtttaatacgggtttagaaacgaaaatgagaattccac

SEQ ID NO: 76778 - DNA, 40 bp, Homo sapiens
tggaattctcattttcgtttctaaacccgtattaaactct

SEQ ID NO: 76779 - DNA, 40 bp, Homo sapiens
agagtttaatacgggtttagaaacgaaaatgagaattcca

SEQ ID NO: 76780 - DNA, 40 bp, Homo sapiens
ggaattctcattttcgtttctaaacccgtattaaactctg

SEQ ID NO: 76781 - DNA, 40 bp, Homo sapiens
cagagtttaatacgggtttagaaacgaaaatgagaattcc

SEQ ID NO: 76782 - DNA, 40 bp, Homo sapiens
gaattctcattttcgtttctaaacccgtattaaactctgt

SEQ ID NO: 76783 - DNA, 40 bp, Homo sapiens
acagagtttaatacgggtttagaaacgaaaatgagaattc

SEQ ID NO: 76784 - DNA, 40 bp, Homo sapiens
aattctcattttcgtttctaaacccgtattaaactctgtc

SEQ ID NO: 76785 - DNA, 40 bp, Homo sapiens
gacagagtttaatacgggtttagaaacgaaaatgagaatt

SEQ ID NO: 76786 - DNA, 40 bp, Homo sapiens
attctcattttcgtttctaaacccgtattaaactctgtct

SEQ ID NO: 76787 - DNA, 40 bp, Homo sapiens
agacagagtttaatacgggtttagaaacgaaaatgagaat

SEQ ID NO: 76788 - DNA, 40 bp, Homo sapiens
ttctcattttcgtttctaaacccgtattaaactctgtctt

SEQ ID NO: 76789 - DNA, 40 bp, Homo sapiens
aagacagagtttaatacgggtttagaaacgaaaatgagaa

SEQ ID NO: 76790 - DNA, 40 bp, Homo sapiens
tctcattttcgtttctaaacccgtattaaactctgtcttg

SEQ ID NO: 76791 - DNA, 40 bp, Homo sapiens
caagacagagtttaatacgggtttagaaacgaaaatgaga

SEQ ID NO: 76792 - DNA, 40 bp, Homo sapiens
ctcattttcgtttctaaacccgtattaaactctgtcttgc

SEQ ID NO: 76793 - DNA, 40 bp, Homo sapiens
gcaagacagagtttaatacgggtttagaaacgaaaatgag

SEQ ID NO: 76794 - DNA, 40 bp, Homo sapiens
tcattttcgtttctaaacccgtattaaactctgtcttgct

SEQ ID NO: 76795 - DNA, 40 bp, Homo sapiens
agcaagacagagtttaatacgggtttagaaacgaaaatga

SEQ ID NO: 76796 - DNA, 40 bp, Homo sapiens
cattttcgtttctaaacccgtattaaactctgtcttgctc

SEQ ID NO: 76797 - DNA, 40 bp, Homo sapiens
gagcaagacagagtttaatacgggtttagaaacgaaaatg

SEQ ID NO: 76798 - DNA, 40 bp, Homo sapiens
attttcgtttctaaacccgtattaaactctgtcttgctca

SEQ ID NO: 76799 - DNA, 40 bp, Homo sapiens
tgagcaagacagagtttaatacgggtttagaaacgaaaat

SEQ ID NO: 76800 - DNA, 40 bp, Homo sapiens
ttttcgtttctaaacccgtattaaactctgtcttgctcag

SEQ ID NO: 76801 - DNA, 40 bp, Homo sapiens
ctgagcaagacagagtttaatacgggtttagaaacgaaaa

SEQ ID NO: 76802 - DNA, 40 bp, Homo sapiens
tttcgtttctaaacccgtattaaactctgtcttgctcaga

SEQ ID NO: 76803 - DNA, 40 bp, Homo sapiens
tctgagcaagacagagtttaatacgggtttagaaacgaaa

SEQ ID NO: 76804 - DNA, 40 bp, Homo sapiens
ttcgtttctaaacccgtattaaactctgtcttgctcagaa

SEQ ID NO: 76805 - DNA, 40 bp, Homo sapiens
ttctgagcaagacagagtttaatacgggtttagaaacgaa

SEQ ID NO: 76806 - DNA, 40 bp, Homo sapiens
tcgtttctaaacccgtattaaactctgtcttgctcagaaa

SEQ ID NO: 76807 - DNA, 40 bp, Homo sapiens
tttctgagcaagacagagtttaatacgggtttagaaacga

SEQ ID NO: 76808 - DNA, 40 bp, Homo sapiens
cgtttctaaacccgtattaaactctgtcttgctcagaaaa

SEQ ID NO: 76809 - DNA, 40 bp, Homo sapiens
ttttctgagcaagacagagtttaatacgggtttagaaacg

SEQ ID NO: 76810 - DNA, 40 bp, Homo sapiens
gtttctaaacccgtattaaactctgtcttgctcagaaaat

SEQ ID NO: 76811 - DNA, 40 bp, Homo sapiens
attttctgagcaagacagagtttaatacgggtttagaaac

SEQ ID NO: 76812 - DNA, 40 bp, Homo sapiens
tttctaaacccgtattaaactctgtcttgctcagaaaata

SEQ ID NO: 76813 - DNA, 40 bp, Homo sapiens
tattttctgagcaagacagagtttaatacgggtttagaaa

SEQ ID NO: 76814 - DNA, 40 bp, Homo sapiens
ttctaaacccgtattaaactctgtcttgctcagaaaatac

SEQ ID NO: 76815 - DNA, 40 bp, Homo sapiens
gtattttctgagcaagacagagtttaatacgggtttagaa

SEQ ID NO: 76816 - DNA, 40 bp, Homo sapiens
tctaaacccgtattaaactctgtcttgctcagaaaatact

SEQ ID NO: 76817 - DNA, 40 bp, Homo sapiens
agtattttctgagcaagacagagtttaatacgggtttaga

SEQ ID NO: 76818 - DNA, 40 bp, Homo sapiens
ctaaacccgtattaaactctgtcttgctcagaaaatactt

SEQ ID NO: 76819 - DNA, 40 bp, Homo sapiens
aagtattttctgagcaagacagagtttaatacgggtttag

SEQ ID NO: 76820 - DNA, 40 bp, Homo sapiens
taaacccgtattaaactctgtcttgctcagaaaatacttc

SEQ ID NO: 76821 - DNA, 40 bp, Homo sapiens
gaagtattttctgagcaagacagagtttaatacgggttta

SEQ ID NO: 76822 - DNA, 40 bp, Homo sapiens
aaacccgtattaaactctgtcttgctcagaaaatacttca

SEQ ID NO: 76823 - DNA, 40 bp, Homo sapiens
tgaagtattttctgagcaagacagagtttaatacgggttt

SEQ ID NO: 76824 - DNA, 40 bp, Homo sapiens
aacccgtattaaactctgtcttgctcagaaaatacttcac

SEQ ID NO: 76825 - DNA, 40 bp, Homo sapiens
gtgaagtattttctgagcaagacagagtttaatacgggtt

SEQ ID NO: 76826 - DNA, 40 bp, Homo sapiens
acccgtattaaactctgtcttgctcagaaaatacttcact

SEQ ID NO: 76827 - DNA, 40 bp, Homo sapiens
agtgaagtattttctgagcaagacagagtttaatacgggt

SEQ ID NO: 76828 - DNA, 40 bp, Homo sapiens
cccgtattaaactctgtcttgctcagaaaatacttcacta

SEQ ID NO: 76829 - DNA, 40 bp, Homo sapiens
tagtgaagtattttctgagcaagacagagtttaatacggg

SEQ ID NO: 76830 - DNA, 40 bp, Homo sapiens
ccgtattaaactctgtcttgctcagaaaatacttcactag

SEQ ID NO: 76831 - DNA, 40 bp, Homo sapiens
ctagtgaagtattttctgagcaagacagagtttaatacgg

SEQ ID NO: 76832 - DNA, 40 bp, Homo sapiens
cgtattaaactctgtcttgctcagaaaatacttcactagg

SEQ ID NO: 76833 - DNA, 40 bp, Homo sapiens
cctagtgaagtattttctgagcaagacagagtttaatacg

SEQ ID NO: 76834 - DNA, 40 bp, Homo sapiens
gtattaaactctgtcttgctcagaaaatacttcactaggt

SEQ ID NO: 76835 - DNA, 40 bp, Homo sapiens
acctagtgaagtattttctgagcaagacagagtttaatac

SEQ ID NO: 76836 - DNA, 40 bp, Homo sapiens
tattaaactctgtcttgctcagaaaatacttcactaggta

SEQ ID NO: 76837 - DNA, 40 bp, Homo sapiens
tacctagtgaagtattttctgagcaagacagagtttaata

SEQ ID NO: 76838 - DNA, 40 bp, Homo sapiens
attaaactctgtcttgctcagaaaatacttcactaggtat

SEQ ID NO: 76839 - DNA, 40 bp, Homo sapiens
atacctagtgaagtattttctgagcaagacagagtttaat

SEQ ID NO: 76840 - DNA, 40 bp, Homo sapiens
ttaaactctgtcttgctcagaaaatacttcactaggtatc

SEQ ID NO: 76841 - DNA, 40 bp, Homo sapiens
gatacctagtgaagtattttctgagcaagacagagtttaa

SEQ ID NO: 76842 - DNA, 40 bp, Homo sapiens
taaactctgtcttgctcagaaaatacttcactaggtatca

SEQ ID NO: 76843 - DNA, 40 bp, Homo sapiens
tgatacctagtgaagtattttctgagcaagacagagttta

SEQ ID NO: 76844 - DNA, 40 bp, Homo sapiens
aaactctgtcttgctcagaaaatacttcactaggtatcat

SEQ ID NO: 76845 - DNA, 40 bp, Homo sapiens
atgatacctagtgaagtattttctgagcaagacagagttt

SEQ ID NO: 76846 - DNA, 40 bp, Homo sapiens
aactctgtcttgctcagaaaatacttcactaggtatcata

SEQ ID NO: 76847 - DNA, 40 bp, Homo sapiens
tatgatacctagtgaagtattttctgagcaagacagagtt

SEQ ID NO: 76848 - DNA, 40 bp, Homo sapiens
actctgtcttgctcagaaaatacttcactaggtatcataa

SEQ ID NO: 76849 - DNA, 40 bp, Homo sapiens
ttatgatacctagtgaagtattttctgagcaagacagagt

SEQ ID NO: 76850 - DNA, 40 bp, Homo sapiens
ctctgtcttgctcagaaaatacttcactaggtatcataaa

SEQ ID NO: 76851 - DNA, 40 bp, Homo sapiens
tttatgatacctagtgaagtattttctgagcaagacagag

SEQ ID NO: 76852 - DNA, 40 bp, Homo sapiens
tctgtcttgctcagaaaatacttcactaggtatcataaag

SEQ ID NO: 76853 - DNA, 40 bp, Homo sapiens
ctttatgatacctagtgaagtattttctgagcaagacaga

SEQ ID NO: 76854 - DNA, 40 bp, Homo sapiens
ctgtcttgctcagaaaatacttcactaggtatcataaagt

SEQ ID NO: 76855 - DNA, 40 bp, Homo sapiens
actttatgatacctagtgaagtattttctgagcaagacag

SEQ ID NO: 76856 - DNA, 40 bp, Homo sapiens
tgtcttgctcagaaaatacttcactaggtatcataaagtt

SEQ ID NO: 76857 - DNA, 40 bp, Homo sapiens
aactttatgatacctagtgaagtattttctgagcaagaca

SEQ ID NO: 76858 - DNA, 40 bp, Homo sapiens
gtcttgctcagaaaatacttcactaggtatcataaagttc

SEQ ID NO: 76859 - DNA, 40 bp, Homo sapiens
gaactttatgatacctagtgaagtattttctgagcaagac

SEQ ID NO: 76860 - DNA, 40 bp, Homo sapiens
tcttgctcagaaaatacttcactaggtatcataaagttca

SEQ ID NO: 76861 - DNA, 40 bp, Homo sapiens
tgaactttatgatacctagtgaagtattttctgagcaaga

SEQ ID NO: 76862 - DNA, 40 bp, Homo sapiens
cttgctcagaaaatacttcactaggtatcataaagttcat

SEQ ID NO: 76863 - DNA, 40 bp, Homo sapiens
atgaactttatgatacctagtgaagtattttctgagcaag

SEQ ID NO: 76864 - DNA, 40 bp, Homo sapiens
ttgctcagaaaatacttcactaggtatcataaagttcatg

SEQ ID NO: 76865 - DNA, 40 bp, Homo sapiens
catgaactttatgatacctagtgaagtattttctgagcaa

SEQ ID NO: 76866 - DNA, 40 bp, Homo sapiens
tgctcagaaaatacttcactaggtatcataaagttcatgg

SEQ ID NO: 76867 - DNA, 40 bp, Homo sapiens
ccatgaactttatgatacctagtgaagtattttctgagca

SEQ ID NO: 76868 - DNA, 40 bp, Homo sapiens
gctcagaaaatacttcactaggtatcataaagttcatggc

SEQ ID NO: 76869 - DNA, 40 bp, Homo sapiens
gccatgaactttatgatacctagtgaagtattttctgagc

SEQ ID NO: 76870 - DNA, 40 bp, Homo sapiens
ctcagaaaatacttcactaggtatcataaagttcatggca

SEQ ID NO: 76871 - DNA, 40 bp, Homo sapiens
tgccatgaactttatgatacctagtgaagtattttctgag

SEQ ID NO: 76872 - DNA, 40 bp, Homo sapiens
tcagaaaatacttcactaggtatcataaagttcatggcag

SEQ ID NO: 76873 - DNA, 40 bp, Homo sapiens
ctgccatgaactttatgatacctagtgaagtattttctga

SEQ ID NO: 76874 - DNA, 40 bp, Homo sapiens
cagaaaatacttcactaggtatcataaagttcatggcaga

SEQ ID NO: 76875 - DNA, 40 bp, Homo sapiens
tctgccatgaactttatgatacctagtgaagtattttctg

SEQ ID NO: 76876 - DNA, 40 bp, Homo sapiens
agaaaatacttcactaggtatcataaagttcatggcagag

SEQ ID NO: 76877 - DNA, 40 bp, Homo sapiens
ctctgccatgaactttatgatacctagtgaagtattttct

SEQ ID NO: 76878 - DNA, 40 bp, Homo sapiens
gaaaatacttcactaggtatcataaagttcatggcagagc

SEQ ID NO: 76879 - DNA, 40 bp, Homo sapiens
gctctgccatgaactttatgatacctagtgaagtattttc

SEQ ID NO: 76880 - DNA, 40 bp, Homo sapiens
aaaatacttcactaggtatcataaagttcatggcagagct

SEQ ID NO: 76881 - DNA, 40 bp, Homo sapiens
agctctgccatgaactttatgatacctagtgaagtatttt

SEQ ID NO: 76882 - DNA, 40 bp, Homo sapiens
aaatacttcactaggtatcataaagttcatggcagagctt

SEQ ID NO: 76883 - DNA, 40 bp, Homo sapiens
aagctctgccatgaactttatgatacctagtgaagtattt

SEQ ID NO: 76884 - DNA, 40 bp, Homo sapiens
aatacttcactaggtatcataaagttcatggcagagctta

SEQ ID NO: 76885 - DNA, 40 bp, Homo sapiens
taagctctgccatgaactttatgatacctagtgaagtatt

SEQ ID NO: 76886 - DNA, 40 bp, Homo sapiens
atacttcactaggtatcataaagttcatggcagagcttaa

SEQ ID NO: 76887 - DNA, 40 bp, Homo sapiens
ttaagctctgccatgaactttatgatacctagtgaagtat

SEQ ID NO: 76888 - DNA, 40 bp, Homo sapiens
tacttcactaggtatcataaagttcatggcagagcttaag

SEQ ID NO: 76889 - DNA, 40 bp, Homo sapiens
cttaagctctgccatgaactttatgatacctagtgaagta

SEQ ID NO: 76890 - DNA, 40 bp, Homo sapiens
acttcactaggtatcataaagttcatggcagagcttaagc

SEQ ID NO: 76891 - DNA, 40 bp, Homo sapiens
gcttaagctctgccatgaactttatgatacctagtgaagt

SEQ ID NO: 76892 - DNA, 40 bp, Homo sapiens
cttcactaggtatcataaagttcatggcagagcttaagct

SEQ ID NO: 76893 - DNA, 40 bp, Homo sapiens
agcttaagctctgccatgaactttatgatacctagtgaag

SEQ ID NO: 76894 - DNA, 40 bp, Homo sapiens
ttcactaggtatcataaagttcatggcagagcttaagctt

SEQ ID NO: 76895 - DNA, 40 bp, Homo sapiens
aagcttaagctctgccatgaactttatgatacctagtgaa

SEQ ID NO: 76896 - DNA, 40 bp, Homo sapiens
tcactaggtatcataaagttcatggcagagcttaagcttt

SEQ ID NO: 76897 - DNA, 40 bp, Homo sapiens
aaagcttaagctctgccatgaactttatgatacctagtga

SEQ ID NO: 76898 - DNA, 40 bp, Homo sapiens
cactaggtatcataaagttcatggcagagcttaagctttg

SEQ ID NO: 76899 - DNA, 40 bp, Homo sapiens
caaagcttaagctctgccatgaactttatgatacctagtg

SEQ ID NO: 76900 - DNA, 40 bp, Homo sapiens
actaggtatcataaagttcatggcagagcttaagctttgg

SEQ ID NO: 76901 - DNA, 40 bp, Homo sapiens
ccaaagcttaagctctgccatgaactttatgatacctagt

SEQ ID NO: 76902 - DNA, 40 bp, Homo sapiens
ctaggtatcataaagttcatggcagagcttaagctttgga

SEQ ID NO: 76903 - DNA, 40 bp, Homo sapiens
tccaaagcttaagctctgccatgaactttatgatacctag

SEQ ID NO: 76904 - DNA, 40 bp, Homo sapiens
taggtatcataaagttcatggcagagcttaagctttggat

SEQ ID NO: 76905 - DNA, 40 bp, Homo sapiens
atccaaagcttaagctctgccatgaactttatgataccta

SEQ ID NO: 76906 - DNA, 40 bp, Homo sapiens
aggtatcataaagttcatggcagagcttaagctttggatg

SEQ ID NO: 76907 - DNA, 40 bp, Homo sapiens
catccaaagcttaagctctgccatgaactttatgatacct

SEQ ID NO: 76908 - DNA, 40 bp, Homo sapiens
ggtatcataaagttcatggcagagcttaagctttggatgc

SEQ ID NO: 76909 - DNA, 40 bp, Homo sapiens
gcatccaaagcttaagctctgccatgaactttatgatacc

SEQ ID NO: 76910 - DNA, 40 bp, Homo sapiens
gtatcataaagttcatggcagagcttaagctttggatgca

SEQ ID NO: 76911 - DNA, 40 bp, Homo sapiens
tgcatccaaagcttaagctctgccatgaactttatgatac

SEQ ID NO: 76912 - DNA, 40 bp, Homo sapiens
tatcataaagttcatggcagagcttaagctttggatgcat

SEQ ID NO: 76913 - DNA, 40 bp, Homo sapiens
atgcatccaaagcttaagctctgccatgaactttatgata

SEQ ID NO: 76914 - DNA, 40 bp, Homo sapiens
atcataaagttcatggcagagcttaagctttggatgcata

SEQ ID NO: 76915 - DNA, 40 bp, Homo sapiens
tatgcatccaaagcttaagctctgccatgaactttatgat

SEQ ID NO: 76916 - DNA, 40 bp, Homo sapiens
tcataaagttcatggcagagcttaagctttggatgcatat

SEQ ID NO: 76917 - DNA, 40 bp, Homo sapiens
atatgcatccaaagcttaagctctgccatgaactttatga

SEQ ID NO: 76918 - DNA, 40 bp, Homo sapiens
cataaagttcatggcagagcttaagctttggatgcatatt

SEQ ID NO: 76919 - DNA, 40 bp, Homo sapiens
aatatgcatccaaagcttaagctctgccatgaactttatg

SEQ ID NO: 76920 - DNA, 40 bp, Homo sapiens
ataaagttcatggcagagcttaagctttggatgcatattg

SEQ ID NO: 76921 - DNA, 40 bp, Homo sapiens
caatatgcatccaaagcttaagctctgccatgaactttat

SEQ ID NO: 76922 - DNA, 40 bp, Homo sapiens
taaagttcatggcagagcttaagctttggatgcatattgt

SEQ ID NO: 76923 - DNA, 40 bp, Homo sapiens
acaatatgcatccaaagcttaagctctgccatgaacttta

SEQ ID NO: 76924 - DNA, 40 bp, Homo sapiens
aaagttcatggcagagcttaagctttggatgcatattgtt

SEQ ID NO: 76925 - DNA, 40 bp, Homo sapiens
aacaatatgcatccaaagcttaagctctgccatgaacttt

SEQ ID NO: 76926 - DNA, 40 bp, Homo sapiens
aagttcatggcagagcttaagctttggatgcatattgttt

SEQ ID NO: 76927 - DNA, 40 bp, Homo sapiens
aaacaatatgcatccaaagcttaagctctgccatgaactt

SEQ ID NO: 76928 - DNA, 40 bp, Homo sapiens
agttcatggcagagcttaagctttggatgcatattgtttg

SEQ ID NO: 76929 - DNA, 40 bp, Homo sapiens
caaacaatatgcatccaaagcttaagctctgccatgaact

SEQ ID NO: 76930 - DNA, 40 bp, Homo sapiens
gttcatggcagagcttaagctttggatgcatattgtttgt

SEQ ID NO: 76931 - DNA, 40 bp, Homo sapiens
acaaacaatatgcatccaaagcttaagctctgccatgaac

SEQ ID NO: 76932 - DNA, 40 bp, Homo sapiens
ttcatggcagagcttaagctttggatgcatattgtttgta

SEQ ID NO: 76933 - DNA, 40 bp, Homo sapiens
tacaaacaatatgcatccaaagcttaagctctgccatgaa

SEQ ID NO: 76934 - DNA, 40 bp, Homo sapiens
tcatggcagagcttaagctttggatgcatattgtttgtaa

SEQ ID NO: 76935 - DNA, 40 bp, Homo sapiens
ttacaaacaatatgcatccaaagcttaagctctgccatga

SEQ ID NO: 76936 - DNA, 40 bp, Homo sapiens
catggcagagcttaagctttggatgcatattgtttgtaat

SEQ ID NO: 76937 - DNA, 40 bp, Homo sapiens
attacaaacaatatgcatccaaagcttaagctctgccatg

SEQ ID NO: 76938 - DNA, 40 bp, Homo sapiens
atggcagagcttaagctttggatgcatattgtttgtaata

SEQ ID NO: 76939 - DNA, 40 bp, Homo sapiens
tattacaaacaatatgcatccaaagcttaagctctgccat

SEQ ID NO: 76940 - DNA, 40 bp, Homo sapiens
tggcagagcttaagctttggatgcatattgtttgtaatat

SEQ ID NO: 76941 - DNA, 40 bp, Homo sapiens
atattacaaacaatatgcatccaaagcttaagctctgcca

SEQ ID NO: 76942 - DNA, 40 bp, Homo sapiens
ggcagagcttaagctttggatgcatattgtttgtaatata

SEQ ID NO: 76943 - DNA, 40 bp, Homo sapiens
tatattacaaacaatatgcatccaaagcttaagctctgcc

SEQ ID NO: 76944 - DNA, 40 bp, Homo sapiens
gcagagcttaagctttggatgcatattgtttgtaatatat

SEQ ID NO: 76945 - DNA, 40 bp, Homo sapiens
atatattacaaacaatatgcatccaaagcttaagctctgc

SEQ ID NO: 76946 - DNA, 40 bp, Homo sapiens
cagagcttaagctttggatgcatattgtttgtaatatatc

SEQ ID NO: 76947 - DNA, 40 bp, Homo sapiens
gatatattacaaacaatatgcatccaaagcttaagctctg

SEQ ID NO: 76948 - DNA, 40 bp, Homo sapiens
agagcttaagctttggatgcatattgtttgtaatatatca

SEQ ID NO: 76949 - DNA, 40 bp, Homo sapiens
tgatatattacaaacaatatgcatccaaagcttaagctct

SEQ ID NO: 76950 - DNA, 40 bp, Homo sapiens
gagcttaagctttggatgcatattgtttgtaatatatcat

SEQ ID NO: 76951 - DNA, 40 bp, Homo sapiens
atgatatattacaaacaatatgcatccaaagcttaagctc

SEQ ID NO: 76952 - DNA, 40 bp, Homo sapiens
agcttaagctttggatgcatattgtttgtaatatatcatg

SEQ ID NO: 76953 - DNA, 40 bp, Homo sapiens
catgatatattacaaacaatatgcatccaaagcttaagct

SEQ ID NO: 76954 - DNA, 40 bp, Homo sapiens
gcttaagctttggatgcatattgtttgtaatatatcatgt

SEQ ID NO: 76955 - DNA, 40 bp, Homo sapiens
acatgatatattacaaacaatatgcatccaaagcttaagc

SEQ ID NO: 76956 - DNA, 40 bp, Homo sapiens
cttaagctttggatgcatattgtttgtaatatatcatgtt

SEQ ID NO: 76957 - DNA, 40 bp, Homo sapiens
aacatgatatattacaaacaatatgcatccaaagcttaag

SEQ ID NO: 76958 - DNA, 40 bp, Homo sapiens
ttaagctttggatgcatattgtttgtaatatatcatgttc

SEQ ID NO: 76959 - DNA, 40 bp, Homo sapiens
gaacatgatatattacaaacaatatgcatccaaagcttaa

SEQ ID NO: 76960 - DNA, 40 bp, Homo sapiens
taagctttggatgcatattgtttgtaatatatcatgttct

SEQ ID NO: 76961 - DNA, 40 bp, Homo sapiens
agaacatgatatattacaaacaatatgcatccaaagctta

SEQ ID NO: 76962 - DNA, 40 bp, Homo sapiens
aagctttggatgcatattgtttgtaatatatcatgttctt

SEQ ID NO: 76963 - DNA, 40 bp, Homo sapiens
aagaacatgatatattacaaacaatatgcatccaaagctt

SEQ ID NO: 76964 - DNA, 40 bp, Homo sapiens
agctttggatgcatattgtttgtaatatatcatgttctta

SEQ ID NO: 76965 - DNA, 40 bp, Homo sapiens
taagaacatgatatattacaaacaatatgcatccaaagct

SEQ ID NO: 76966 - DNA, 40 bp, Homo sapiens
gctttggatgcatattgtttgtaatatatcatgttcttaa

SEQ ID NO: 76967 - DNA, 40 bp, Homo sapiens
ttaagaacatgatatattacaaacaatatgcatccaaagc

SEQ ID NO: 76968 - DNA, 40 bp, Homo sapiens
ctttggatgcatattgtttgtaatatatcatgttcttaag

SEQ ID NO: 76969 - DNA, 40 bp, Homo sapiens
cttaagaacatgatatattacaaacaatatgcatccaaag

SEQ ID NO: 76970 - DNA, 40 bp, Homo sapiens
tttggatgcatattgtttgtaatatatcatgttcttaaga

SEQ ID NO: 76971 - DNA, 40 bp, Homo sapiens
tcttaagaacatgatatattacaaacaatatgcatccaaa

SEQ ID NO: 76972 - DNA, 40 bp, Homo sapiens
ttggatgcatattgtttgtaatatatcatgttcttaagaa

SEQ ID NO: 76973 - DNA, 40 bp, Homo sapiens
ttcttaagaacatgatatattacaaacaatatgcatccaa

SEQ ID NO: 76974 - DNA, 40 bp, Homo sapiens
tggatgcatattgtttgtaatatatcatgttcttaagaat

SEQ ID NO: 76975 - DNA, 40 bp, Homo sapiens
attcttaagaacatgatatattacaaacaatatgcatcca

SEQ ID NO: 76976 - DNA, 40 bp, Homo sapiens
ggatgcatattgtttgtaatatatcatgttcttaagaata

SEQ ID NO: 76977 - DNA, 40 bp, Homo sapiens
tattcttaagaacatgatatattacaaacaatatgcatcc

SEQ ID NO: 76978 - DNA, 40 bp, Homo sapiens
gatgcatattgtttgtaatatatcatgttcttaagaatag

SEQ ID NO: 76979 - DNA, 40 bp, Homo sapiens
ctattcttaagaacatgatatattacaaacaatatgcatc

SEQ ID NO: 76980 - DNA, 40 bp, Homo sapiens
atgcatattgtttgtaatatatcatgttcttaagaatagg

SEQ ID NO: 76981 - DNA, 40 bp, Homo sapiens
cctattcttaagaacatgatatattacaaacaatatgcat

SEQ ID NO: 76982 - DNA, 40 bp, Homo sapiens
tgcatattgtttgtaatatatcatgttcttaagaataggc

SEQ ID NO: 76983 - DNA, 40 bp, Homo sapiens
gcctattcttaagaacatgatatattacaaacaatatgca

SEQ ID NO: 76984 - DNA, 40 bp, Homo sapiens
gcatattgtttgtaatatatcatgttcttaagaataggca

SEQ ID NO: 76985 - DNA, 40 bp, Homo sapiens
tgcctattcttaagaacatgatatattacaaacaatatgc

SEQ ID NO: 76986 - DNA, 40 bp, Homo sapiens
catattgtttgtaatatatcatgttcttaagaataggcaa

SEQ ID NO: 76987 - DNA, 40 bp, Homo sapiens
ttgcctattcttaagaacatgatatattacaaacaatatg

SEQ ID NO: 76988 - DNA, 40 bp, Homo sapiens
atattgtttgtaatatatcatgttcttaagaataggcaat

SEQ ID NO: 76989 - DNA, 40 bp, Homo sapiens
attgcctattcttaagaacatgatatattacaaacaatat

SEQ ID NO: 76990 - DNA, 40 bp, Homo sapiens
tattgtttgtaatatatcatgttcttaagaataggcaata

SEQ ID NO: 76991 - DNA, 40 bp, Homo sapiens
tattgcctattcttaagaacatgatatattacaaacaata

SEQ ID NO: 76992 - DNA, 40 bp, Homo sapiens
attgtttgtaatatatcatgttcttaagaataggcaataa

SEQ ID NO: 76993 - DNA, 40 bp, Homo sapiens
ttattgcctattcttaagaacatgatatattacaaacaat

SEQ ID NO: 76994 - DNA, 40 bp, Homo sapiens
ttgtttgtaatatatcatgttcttaagaataggcaataaa

SEQ ID NO: 76995 - DNA, 40 bp, Homo sapiens
tttattgcctattcttaagaacatgatatattacaaacaa

SEQ ID NO: 76996 - DNA, 40 bp, Homo sapiens
tgtttgtaatatatcatgttcttaagaataggcaataaaa

SEQ ID NO: 76997 - DNA, 40 bp, Homo sapiens
ttttattgcctattcttaagaacatgatatattacaaaca

SEQ ID NO: 76998 - DNA, 40 bp, Homo sapiens
gtttgtaatatatcatgttcttaagaataggcaataaaat

SEQ ID NO: 76999 - DNA, 40 bp, Homo sapiens
attttattgcctattcttaagaacatgatatattacaaac

SEQ ID NO: 77000 - DNA, 40 bp, Homo sapiens
tttgtaatatatcatgttcttaagaataggcaataaaatt

SEQ ID NO: 77001 - DNA, 40 bp, Homo sapiens
aattttattgcctattcttaagaacatgatatattacaaa

SEQ ID NO: 77002 - DNA, 40 bp, Homo sapiens
ttgtaatatatcatgttcttaagaataggcaataaaatta

SEQ ID NO: 77003 - DNA, 40 bp, Homo sapiens
taattttattgcctattcttaagaacatgatatattacaa

SEQ ID NO: 77004 - DNA, 40 bp, Homo sapiens
tgtaatatatcatgttcttaagaataggcaataaaattac

SEQ ID NO: 77005 - DNA, 40 bp, Homo sapiens
gtaattttattgcctattcttaagaacatgatatattaca

SEQ ID NO: 77006 - DNA, 40 bp, Homo sapiens
gtaatatatcatgttcttaagaataggcaataaaattaca

SEQ ID NO: 77007 - DNA, 40 bp, Homo sapiens
tgtaattttattgcctattcttaagaacatgatatattac

SEQ ID NO: 77008 - DNA, 40 bp, Homo sapiens
taatatatcatgttcttaagaataggcaataaaattacag

SEQ ID NO: 77009 - DNA, 40 bp, Homo sapiens
ctgtaattttattgcctattcttaagaacatgatatatta

SEQ ID NO: 77010 - DNA, 40 bp, Homo sapiens
aatatatcatgttcttaagaataggcaataaaattacagt

SEQ ID NO: 77011 - DNA, 40 bp, Homo sapiens
actgtaattttattgcctattcttaagaacatgatatatt

SEQ ID NO: 77012 - DNA, 40 bp, Homo sapiens
atatatcatgttcttaagaataggcaataaaattacagtt

SEQ ID NO: 77013 - DNA, 40 bp, Homo sapiens
aactgtaattttattgcctattcttaagaacatgatatat

SEQ ID NO: 77014 - DNA, 40 bp, Homo sapiens
tatatcatgttcttaagaataggcaataaaattacagttt

SEQ ID NO: 77015 - DNA, 40 bp, Homo sapiens
aaactgtaattttattgcctattcttaagaacatgatata

SEQ ID NO: 77016 - DNA, 40 bp, Homo sapiens
atatcatgttcttaagaataggcaataaaattacagtttt

SEQ ID NO: 77017 - DNA, 40 bp, Homo sapiens
aaaactgtaattttattgcctattcttaagaacatgatat

SEQ ID NO: 77018 - DNA, 40 bp, Homo sapiens
tatcatgttcttaagaataggcaataaaattacagttttc

SEQ ID NO: 77019 - DNA, 40 bp, Homo sapiens
gaaaactgtaattttattgcctattcttaagaacatgata

SEQ ID NO: 77020 - DNA, 40 bp, Homo sapiens
atcatgttcttaagaataggcaataaaattacagttttca

SEQ ID NO: 77021 - DNA, 40 bp, Homo sapiens
tgaaaactgtaattttattgcctattcttaagaacatgat

SEQ ID NO: 77022 - DNA, 40 bp, Homo sapiens
tcatgttcttaagaataggcaataaaattacagttttcaa

SEQ ID NO: 77023 - DNA, 40 bp, Homo sapiens
ttgaaaactgtaattttattgcctattcttaagaacatga

SEQ ID NO: 77024 - DNA, 40 bp, Homo sapiens
catgttcttaagaataggcaataaaattacagttttcaaa

SEQ ID NO: 77025 - DNA, 40 bp, Homo sapiens
tttgaaaactgtaattttattgcctattcttaagaacatg

SEQ ID NO: 77026 - DNA, 40 bp, Homo sapiens
atgttcttaagaataggcaataaaattacagttttcaaaa

SEQ ID NO: 77027 - DNA, 40 bp, Homo sapiens
ttttgaaaactgtaattttattgcctattcttaagaacat

SEQ ID NO: 77028 - DNA, 40 bp, Homo sapiens
tgttcttaagaataggcaataaaattacagttttcaaaaa

SEQ ID NO: 77029 - DNA, 40 bp, Homo sapiens
tttttgaaaactgtaattttattgcctattcttaagaaca

SEQ ID NO: 77030 - DNA, 40 bp, Homo sapiens
gttcttaagaataggcaataaaattacagttttcaaaaac

SEQ ID NO: 77031 - DNA, 40 bp, Homo sapiens
gtttttgaaaactgtaattttattgcctattcttaagaac

SEQ ID NO: 77032 - DNA, 40 bp, Homo sapiens
ttcttaagaataggcaataaaattacagttttcaaaaact

SEQ ID NO: 77033 - DNA, 40 bp, Homo sapiens
agtttttgaaaactgtaattttattgcctattcttaagaa

SEQ ID NO: 77034 - DNA, 40 bp, Homo sapiens
tcttaagaataggcaataaaattacagttttcaaaaacta

SEQ ID NO: 77035 - DNA, 40 bp, Homo sapiens
tagtttttgaaaactgtaattttattgcctattcttaaga

SEQ ID NO: 77036 - DNA, 40 bp, Homo sapiens
cttaagaataggcaataaaattacagttttcaaaaactac

SEQ ID NO: 77037 - DNA, 40 bp, Homo sapiens
gtagtttttgaaaactgtaattttattgcctattcttaag

SEQ ID NO: 77038 - DNA, 40 bp, Homo sapiens
ttaagaataggcaataaaattacagttttcaaaaactact

SEQ ID NO: 77039 - DNA, 40 bp, Homo sapiens
agtagtttttgaaaactgtaattttattgcctattcttaa

SEQ ID NO: 77040 - DNA, 40 bp, Homo sapiens
taagaataggcaataaaattacagttttcaaaaactacta

SEQ ID NO: 77041 - DNA, 40 bp, Homo sapiens
tagtagtttttgaaaactgtaattttattgcctattctta

SEQ ID NO: 77042 - DNA, 40 bp, Homo sapiens
aagaataggcaataaaattacagttttcaaaaactactac

SEQ ID NO: 77043 - DNA, 40 bp, Homo sapiens
gtagtagtttttgaaaactgtaattttattgcctattctt

SEQ ID NO: 77044 - DNA, 40 bp, Homo sapiens
agaataggcaataaaattacagttttcaaaaactactaca

SEQ ID NO: 77045 - DNA, 40 bp, Homo sapiens
tgtagtagtttttgaaaactgtaattttattgcctattct

SEQ ID NO: 77046 - DNA, 40 bp, Homo sapiens
gaataggcaataaaattacagttttcaaaaactactacat

SEQ ID NO: 77047 - DNA, 40 bp, Homo sapiens
atgtagtagtttttgaaaactgtaattttattgcctattc

SEQ ID NO: 77048 - DNA, 40 bp, Homo sapiens
aataggcaataaaattacagttttcaaaaactactacatt

SEQ ID NO: 77049 - DNA, 40 bp, Homo sapiens
aatgtagtagtttttgaaaactgtaattttattgcctatt

SEQ ID NO: 77050 - DNA, 40 bp, Homo sapiens
ataggcaataaaattacagttttcaaaaactactacattt

SEQ ID NO: 77051 - DNA, 40 bp, Homo sapiens
aaatgtagtagtttttgaaaactgtaattttattgcctat

SEQ ID NO: 77052 - DNA, 40 bp, Homo sapiens
taggcaataaaattacagttttcaaaaactactacattta

SEQ ID NO: 77053 - DNA, 40 bp, Homo sapiens
taaatgtagtagtttttgaaaactgtaattttattgccta

SEQ ID NO: 77054 - DNA, 40 bp, Homo sapiens
aggcaataaaattacagttttcaaaaactactacatttat

SEQ ID NO: 77055 - DNA, 40 bp, Homo sapiens
ataaatgtagtagtttttgaaaactgtaattttattgcct

SEQ ID NO: 77056 - DNA, 40 bp, Homo sapiens
ggcaataaaattacagttttcaaaaactactacatttatt

SEQ ID NO: 77057 - DNA, 40 bp, Homo sapiens
aataaatgtagtagtttttgaaaactgtaattttattgcc

SEQ ID NO: 77058 - DNA, 40 bp, Homo sapiens
gcaataaaattacagttttcaaaaactactacatttatta

SEQ ID NO: 77059 - DNA, 40 bp, Homo sapiens
taataaatgtagtagtttttgaaaactgtaattttattgc

SEQ ID NO: 77060 - DNA, 40 bp, Homo sapiens
caataaaattacagttttcaaaaactactacatttattat

SEQ ID NO: 77061 - DNA, 40 bp, Homo sapiens
ataataaatgtagtagtttttgaaaactgtaattttattg

SEQ ID NO: 77062 - DNA, 40 bp, Homo sapiens
aataaaattacagttttcaaaaactactacatttattata

SEQ ID NO: 77063 - DNA, 40 bp, Homo sapiens
tataataaatgtagtagtttttgaaaactgtaattttatt

SEQ ID NO: 77064 - DNA, 40 bp, Homo sapiens
ataaaattacagttttcaaaaactactacatttattatat

SEQ ID NO: 77065 - DNA, 40 bp, Homo sapiens
atataataaatgtagtagtttttgaaaactgtaattttat

SEQ ID NO: 77066 - DNA, 40 bp, Homo sapiens
taaaattacagttttcaaaaactactacatttattatatt

SEQ ID NO: 77067 - DNA, 40 bp, Homo sapiens
aatataataaatgtagtagtttttgaaaactgtaatttta

SEQ ID NO: 77068 - DNA, 40 bp, Homo sapiens
aaaattacagttttcaaaaactactacatttattatattt

SEQ ID NO: 77069 - DNA, 40 bp, Homo sapiens
aaatataataaatgtagtagtttttgaaaactgtaatttt

SEQ ID NO: 77070 - DNA, 40 bp, Homo sapiens
aaattacagttttcaaaaactactacatttattatattta

SEQ ID NO: 77071 - DNA, 40 bp, Homo sapiens
taaatataataaatgtagtagtttttgaaaactgtaattt

SEQ ID NO: 77072 - DNA, 40 bp, Homo sapiens
aattacagttttcaaaaactactacatttattatatttat

SEQ ID NO: 77073 - DNA, 40 bp, Homo sapiens
ataaatataataaatgtagtagtttttgaaaactgtaatt

SEQ ID NO: 77074 - DNA, 40 bp, Homo sapiens
attacagttttcaaaaactactacatttattatatttatt

SEQ ID NO: 77075 - DNA, 40 bp, Homo sapiens
aataaatataataaatgtagtagtttttgaaaactgtaat

SEQ ID NO: 77076 - DNA, 40 bp, Homo sapiens
ttacagttttcaaaaactactacatttattatatttatta

SEQ ID NO: 77077 - DNA, 40 bp, Homo sapiens
taataaatataataaatgtagtagtttttgaaaactgtaa

SEQ ID NO: 77078 - DNA, 40 bp, Homo sapiens
tacagttttcaaaaactactacatttattatatttattac

SEQ ID NO: 77079 - DNA, 40 bp, Homo sapiens
gtaataaatataataaatgtagtagtttttgaaaactgta

SEQ ID NO: 77080 - DNA, 40 bp, Homo sapiens
acagttttcaaaaactactacatttattatatttattaca

SEQ ID NO: 77081 - DNA, 40 bp, Homo sapiens
tgtaataaatataataaatgtagtagtttttgaaaactgt

SEQ ID NO: 77082 - DNA, 40 bp, Homo sapiens
cagttttcaaaaactactacatttattatatttattacaa

SEQ ID NO: 77083 - DNA, 40 bp, Homo sapiens
ttgtaataaatataataaatgtagtagtttttgaaaactg

SEQ ID NO: 77084 - DNA, 40 bp, Homo sapiens
agttttcaaaaactactacatttattatatttattacaag

SEQ ID NO: 77085 - DNA, 40 bp, Homo sapiens
cttgtaataaatataataaatgtagtagtttttgaaaact

SEQ ID NO: 77086 - DNA, 40 bp, Homo sapiens
gttttcaaaaactactacatttattatatttattacaagt

SEQ ID NO: 77087 - DNA, 40 bp, Homo sapiens
acttgtaataaatataataaatgtagtagtttttgaaaac

SEQ ID NO: 77088 - DNA, 40 bp, Homo sapiens
ttttcaaaaactactacatttattatatttattacaagtt

SEQ ID NO: 77089 - DNA, 40 bp, Homo sapiens
aacttgtaataaatataataaatgtagtagtttttgaaaa

SEQ ID NO: 77090 - DNA, 40 bp, Homo sapiens
tttcaaaaactactacatttattatatttattacaagttg

SEQ ID NO: 77091 - DNA, 40 bp, Homo sapiens
caacttgtaataaatataataaatgtagtagtttttgaaa

SEQ ID NO: 77092 - DNA, 40 bp, Homo sapiens
ttcaaaaactactacatttattatatttattacaagttgg

SEQ ID NO: 77093 - DNA, 40 bp, Homo sapiens
ccaacttgtaataaatataataaatgtagtagtttttgaa

SEQ ID NO: 77094 - DNA, 40 bp, Homo sapiens
tcaaaaactactacatttattatatttattacaagttggt

SEQ ID NO: 77095 - DNA, 40 bp, Homo sapiens
accaacttgtaataaatataataaatgtagtagtttttga

SEQ ID NO: 77096 - DNA, 40 bp, Homo sapiens
caaaaactactacatttattatatttattacaagttggtg

SEQ ID NO: 77097 - DNA, 40 bp, Homo sapiens
caccaacttgtaataaatataataaatgtagtagtttttg

SEQ ID NO: 77098 - DNA, 40 bp, Homo sapiens
aaaaactactacatttattatatttattacaagttggtgt

SEQ ID NO: 77099 - DNA, 40 bp, Homo sapiens
acaccaacttgtaataaatataataaatgtagtagttttt

SEQ ID NO: 77100 - DNA, 40 bp, Homo sapiens
aaaactactacatttattatatttattacaagttggtgtt

SEQ ID NO: 77101 - DNA, 40 bp, Homo sapiens
aacaccaacttgtaataaatataataaatgtagtagtttt

SEQ ID NO: 77102 - DNA, 40 bp, Homo sapiens
aaactactacatttattatatttattacaagttggtgttc

SEQ ID NO: 77103 - DNA, 40 bp, Homo sapiens
gaacaccaacttgtaataaatataataaatgtagtagttt

SEQ ID NO: 77104 - DNA, 40 bp, Homo sapiens
aactactacatttattatatttattacaagttggtgttct

SEQ ID NO: 77105 - DNA, 40 bp, Homo sapiens
agaacaccaacttgtaataaatataataaatgtagtagtt

SEQ ID NO: 77106 - DNA, 40 bp, Homo sapiens
actactacatttattatatttattacaagttggtgttctt

SEQ ID NO: 77107 - DNA, 40 bp, Homo sapiens
aagaacaccaacttgtaataaatataataaatgtagtagt

SEQ ID NO: 77108 - DNA, 40 bp, Homo sapiens
ctactacatttattatatttattacaagttggtgttcttt

SEQ ID NO: 77109 - DNA, 40 bp, Homo sapiens
aaagaacaccaacttgtaataaatataataaatgtagtag

SEQ ID NO: 77110 - DNA, 40 bp, Homo sapiens
tactacatttattatatttattacaagttggtgttcttta

SEQ ID NO: 77111 - DNA, 40 bp, Homo sapiens
taaagaacaccaacttgtaataaatataataaatgtagta

SEQ ID NO: 77112 - DNA, 40 bp, Homo sapiens
actacatttattatatttattacaagttggtgttctttat

SEQ ID NO: 77113 - DNA, 40 bp, Homo sapiens
ataaagaacaccaacttgtaataaatataataaatgtagt

SEQ ID NO: 77114 - DNA, 40 bp, Homo sapiens
ctacatttattatatttattacaagttggtgttctttatt

SEQ ID NO: 77115 - DNA, 40 bp, Homo sapiens
aataaagaacaccaacttgtaataaatataataaatgtag

SEQ ID NO: 77116 - DNA, 40 bp, Homo sapiens
tacatttattatatttattacaagttggtgttctttatta

SEQ ID NO: 77117 - DNA, 40 bp, Homo sapiens
taataaagaacaccaacttgtaataaatataataaatgta

SEQ ID NO: 77118 - DNA, 40 bp, Homo sapiens
acatttattatatttattacaagttggtgttctttattac

SEQ ID NO: 77119 - DNA, 40 bp, Homo sapiens
gtaataaagaacaccaacttgtaataaatataataaatgt

SEQ ID NO: 77120 - DNA, 40 bp, Homo sapiens
catttattatatttattacaagttggtgttctttattaca

SEQ ID NO: 77121 - DNA, 40 bp, Homo sapiens
tgtaataaagaacaccaacttgtaataaatataataaatg

SEQ ID NO: 77122 - DNA, 40 bp, Homo sapiens
atttattatatttattacaagttggtgttctttattacat

SEQ ID NO: 77123 - DNA, 40 bp, Homo sapiens
atgtaataaagaacaccaacttgtaataaatataataaat

SEQ ID NO: 77124 - DNA, 40 bp, Homo sapiens
tttattatatttattacaagttggtgttctttattacatg

SEQ ID NO: 77125 - DNA, 40 bp, Homo sapiens
catgtaataaagaacaccaacttgtaataaatataataaa

SEQ ID NO: 77126 - DNA, 40 bp, Homo sapiens
ttattatatttattacaagttggtgttctttattacatga

SEQ ID NO: 77127 - DNA, 40 bp, Homo sapiens
tcatgtaataaagaacaccaacttgtaataaatataataa

SEQ ID NO: 77128 - DNA, 40 bp, Homo sapiens
tattatatttattacaagttggtgttctttattacatgaa

SEQ ID NO: 77129 - DNA, 40 bp, Homo sapiens
ttcatgtaataaagaacaccaacttgtaataaatataata

SEQ ID NO: 77130 - DNA, 40 bp, Homo sapiens
attatatttattacaagttggtgttctttattacatgaat

SEQ ID NO: 77131 - DNA, 40 bp, Homo sapiens
attcatgtaataaagaacaccaacttgtaataaatataat

SEQ ID NO: 77132 - DNA, 40 bp, Homo sapiens
ttatatttattacaagttggtgttctttattacatgaatt

SEQ ID NO: 77133 - DNA, 40 bp, Homo sapiens
aattcatgtaataaagaacaccaacttgtaataaatataa

SEQ ID NO: 77134 - DNA, 40 bp, Homo sapiens
tatatttattacaagttggtgttctttattacatgaattt

SEQ ID NO: 77135 - DNA, 40 bp, Homo sapiens
aaattcatgtaataaagaacaccaacttgtaataaatata

SEQ ID NO: 77136 - DNA, 40 bp, Homo sapiens
atatttattacaagttggtgttctttattacatgaatttt

SEQ ID NO: 77137 - DNA, 40 bp, Homo sapiens
aaaattcatgtaataaagaacaccaacttgtaataaatat

SEQ ID NO: 77138 - DNA, 40 bp, Homo sapiens
tatttattacaagttggtgttctttattacatgaatttta

SEQ ID NO: 77139 - DNA, 40 bp, Homo sapiens
taaaattcatgtaataaagaacaccaacttgtaataaata

SEQ ID NO: 77140 - DNA, 40 bp, Homo sapiens
atttattacaagttggtgttctttattacatgaattttag

SEQ ID NO: 77141 - DNA, 40 bp, Homo sapiens
ctaaaattcatgtaataaagaacaccaacttgtaataaat

SEQ ID NO: 77142 - DNA, 40 bp, Homo sapiens
tttattacaagttggtgttctttattacatgaattttagg

SEQ ID NO: 77143 - DNA, 40 bp, Homo sapiens
cctaaaattcatgtaataaagaacaccaacttgtaataaa

SEQ ID NO: 77144 - DNA, 40 bp, Homo sapiens
ttattacaagttggtgttctttattacatgaattttaggt

SEQ ID NO: 77145 - DNA, 40 bp, Homo sapiens
acctaaaattcatgtaataaagaacaccaacttgtaataa

SEQ ID NO: 77146 - DNA, 40 bp, Homo sapiens
tattacaagttggtgttctttattacatgaattttaggta

SEQ ID NO: 77147 - DNA, 40 bp, Homo sapiens
tacctaaaattcatgtaataaagaacaccaacttgtaata

SEQ ID NO: 77148 - DNA, 40 bp, Homo sapiens
attacaagttggtgttctttattacatgaattttaggtat

SEQ ID NO: 77149 - DNA, 40 bp, Homo sapiens
atacctaaaattcatgtaataaagaacaccaacttgtaat

SEQ ID NO: 77150 - DNA, 40 bp, Homo sapiens
ttacaagttggtgttctttattacatgaattttaggtatt

SEQ ID NO: 77151 - DNA, 40 bp, Homo sapiens
aatacctaaaattcatgtaataaagaacaccaacttgtaa

SEQ ID NO: 77152 - DNA, 40 bp, Homo sapiens
tacaagttggtgttctttattacatgaattttaggtattt

SEQ ID NO: 77153 - DNA, 40 bp, Homo sapiens
aaatacctaaaattcatgtaataaagaacaccaacttgta

SEQ ID NO: 77154 - DNA, 40 bp, Homo sapiens
acaagttggtgttctttattacatgaattttaggtatttc

SEQ ID NO: 77155 - DNA, 40 bp, Homo sapiens
gaaatacctaaaattcatgtaataaagaacaccaacttgt

SEQ ID NO: 77156 - DNA, 40 bp, Homo sapiens
caagttggtgttctttattacatgaattttaggtatttcc

SEQ ID NO: 77157 - DNA, 40 bp, Homo sapiens
ggaaatacctaaaattcatgtaataaagaacaccaacttg

SEQ ID NO: 77158 - DNA, 40 bp, Homo sapiens
aagttggtgttctttattacatgaattttaggtatttccc

SEQ ID NO: 77159 - DNA, 40 bp, Homo sapiens
gggaaatacctaaaattcatgtaataaagaacaccaactt

SEQ ID NO: 77160 - DNA, 40 bp, Homo sapiens
agttggtgttctttattacatgaattttaggtatttccca

SEQ ID NO: 77161 - DNA, 40 bp, Homo sapiens
tgggaaatacctaaaattcatgtaataaagaacaccaact

SEQ ID NO: 77162 - DNA, 40 bp, Homo sapiens
gttggtgttctttattacatgaattttaggtatttcccaa

SEQ ID NO: 77163 - DNA, 40 bp, Homo sapiens
ttgggaaatacctaaaattcatgtaataaagaacaccaac

SEQ ID NO: 77164 - DNA, 40 bp, Homo sapiens
ttggtgttctttattacatgaattttaggtatttcccaaa

SEQ ID NO: 77165 - DNA, 40 bp, Homo sapiens
tttgggaaatacctaaaattcatgtaataaagaacaccaa

SEQ ID NO: 77166 - DNA, 40 bp, Homo sapiens
tggtgttctttattacatgaattttaggtatttcccaaaa

SEQ ID NO: 77167 - DNA, 40 bp, Homo sapiens
ttttgggaaatacctaaaattcatgtaataaagaacacca

SEQ ID NO: 77168 - DNA, 40 bp, Homo sapiens
ggtgttctttattacatgaattttaggtatttcccaaaag

SEQ ID NO: 77169 - DNA, 40 bp, Homo sapiens
cttttgggaaatacctaaaattcatgtaataaagaacacc

SEQ ID NO: 77170 - DNA, 40 bp, Homo sapiens
gtgttctttattacatgaattttaggtatttcccaaaagt

SEQ ID NO: 77171 - DNA, 40 bp, Homo sapiens
acttttgggaaatacctaaaattcatgtaataaagaacac

SEQ ID NO: 77172 - DNA, 40 bp, Homo sapiens
tgttctttattacatgaattttaggtatttcccaaaagta

SEQ ID NO: 77173 - DNA, 40 bp, Homo sapiens
tacttttgggaaatacctaaaattcatgtaataaagaaca

SEQ ID NO: 77174 - DNA, 40 bp, Homo sapiens
gttctttattacatgaattttaggtatttcccaaaagtat

SEQ ID NO: 77175 - DNA, 40 bp, Homo sapiens
atacttttgggaaatacctaaaattcatgtaataaagaac

SEQ ID NO: 77176 - DNA, 40 bp, Homo sapiens
ttctttattacatgaattttaggtatttcccaaaagtata

SEQ ID NO: 77177 - DNA, 40 bp, Homo sapiens
tatacttttgggaaatacctaaaattcatgtaataaagaa

SEQ ID NO: 77178 - DNA, 40 bp, Homo sapiens
tctttattacatgaattttaggtatttcccaaaagtataa

SEQ ID NO: 77179 - DNA, 40 bp, Homo sapiens
ttatacttttgggaaatacctaaaattcatgtaataaaga

SEQ ID NO: 77180 - DNA, 40 bp, Homo sapiens
ctttattacatgaattttaggtatttcccaaaagtataaa

SEQ ID NO: 77181 - DNA, 40 bp, Homo sapiens
tttatacttttgggaaatacctaaaattcatgtaataaag

SEQ ID NO: 77182 - DNA, 40 bp, Homo sapiens
tttattacatgaattttaggtatttcccaaaagtataaaa

SEQ ID NO: 77183 - DNA, 40 bp, Homo sapiens
ttttatacttttgggaaatacctaaaattcatgtaataaa

SEQ ID NO: 77184 - DNA, 40 bp, Homo sapiens
ttattacatgaattttaggtatttcccaaaagtataaaat

SEQ ID NO: 77185 - DNA, 40 bp, Homo sapiens
attttatacttttgggaaatacctaaaattcatgtaataa

SEQ ID NO: 77186 - DNA, 40 bp, Homo sapiens
tattacatgaattttaggtatttcccaaaagtataaaata

SEQ ID NO: 77187 - DNA, 40 bp, Homo sapiens
tattttatacttttgggaaatacctaaaattcatgtaata

SEQ ID NO: 77188 - DNA, 40 bp, Homo sapiens
attacatgaattttaggtatttcccaaaagtataaaatat

SEQ ID NO: 77189 - DNA, 40 bp, Homo sapiens
atattttatacttttgggaaatacctaaaattcatgtaat

SEQ ID NO: 77190 - DNA, 40 bp, Homo sapiens
ttacatgaattttaggtatttcccaaaagtataaaatata

SEQ ID NO: 77191 - DNA, 40 bp, Homo sapiens
tatattttatacttttgggaaatacctaaaattcatgtaa

SEQ ID NO: 77192 - DNA, 40 bp, Homo sapiens
tacatgaattttaggtatttcccaaaagtataaaatatac

SEQ ID NO: 77193 - DNA, 40 bp, Homo sapiens
gtatattttatacttttgggaaatacctaaaattcatgta

SEQ ID NO: 77194 - DNA, 40 bp, Homo sapiens
acatgaattttaggtatttcccaaaagtataaaatataca

SEQ ID NO: 77195 - DNA, 40 bp, Homo sapiens
tgtatattttatacttttgggaaatacctaaaattcatgt

SEQ ID NO: 77196 - DNA, 40 bp, Homo sapiens
catgaattttaggtatttcccaaaagtataaaatatacat

SEQ ID NO: 77197 - DNA, 40 bp, Homo sapiens
atgtatattttatacttttgggaaatacctaaaattcatg

SEQ ID NO: 77198 - DNA, 40 bp, Homo sapiens
atgaattttaggtatttcccaaaagtataaaatatacatt

SEQ ID NO: 77199 - DNA, 40 bp, Homo sapiens
aatgtatattttatacttttgggaaatacctaaaattcat

SEQ ID NO: 77200 - DNA, 40 bp, Homo sapiens
tgaattttaggtatttcccaaaagtataaaatatacattt

SEQ ID NO: 77201 - DNA, 40 bp, Homo sapiens
aaatgtatattttatacttttgggaaatacctaaaattca

SEQ ID NO: 77202 - DNA, 40 bp, Homo sapiens
gaattttaggtatttcccaaaagtataaaatatacatttg

SEQ ID NO: 77203 - DNA, 40 bp, Homo sapiens
caaatgtatattttatacttttgggaaatacctaaaattc

SEQ ID NO: 77204 - DNA, 40 bp, Homo sapiens
aattttaggtatttcccaaaagtataaaatatacatttga

SEQ ID NO: 77205 - DNA, 40 bp, Homo sapiens
tcaaatgtatattttatacttttgggaaatacctaaaatt

SEQ ID NO: 77206 - DNA, 40 bp, Homo sapiens
attttaggtatttcccaaaagtataaaatatacatttgaa

SEQ ID NO: 77207 - DNA, 40 bp, Homo sapiens
ttcaaatgtatattttatacttttgggaaatacctaaaat

SEQ ID NO: 77208 - DNA, 40 bp, Homo sapiens
ttttaggtatttcccaaaagtataaaatatacatttgaat

SEQ ID NO: 77209 - DNA, 40 bp, Homo sapiens
attcaaatgtatattttatacttttgggaaatacctaaaa

SEQ ID NO: 77210 - DNA, 40 bp, Homo sapiens
tttaggtatttcccaaaagtataaaatatacatttgaata

SEQ ID NO: 77211 - DNA, 40 bp, Homo sapiens
tattcaaatgtatattttatacttttgggaaatacctaaa

SEQ ID NO: 77212 - DNA, 40 bp, Homo sapiens
ttaggtatttcccaaaagtataaaatatacatttgaatag

SEQ ID NO: 77213 - DNA, 40 bp, Homo sapiens
ctattcaaatgtatattttatacttttgggaaatacctaa

SEQ ID NO: 77214 - DNA, 40 bp, Homo sapiens
taggtatttcccaaaagtataaaatatacatttgaatagt

SEQ ID NO: 77215 - DNA, 40 bp, Homo sapiens
actattcaaatgtatattttatacttttgggaaataccta

SEQ ID NO: 77216 - DNA, 40 bp, Homo sapiens
aggtatttcccaaaagtataaaatatacatttgaatagta

SEQ ID NO: 77217 - DNA, 40 bp, Homo sapiens
tactattcaaatgtatattttatacttttgggaaatacct

SEQ ID NO: 77218 - DNA, 40 bp, Homo sapiens
ggtatttcccaaaagtataaaatatacatttgaatagtag

SEQ ID NO: 77219 - DNA, 40 bp, Homo sapiens
ctactattcaaatgtatattttatacttttgggaaatacc

SEQ ID NO: 77220 - DNA, 40 bp, Homo sapiens
gtatttcccaaaagtataaaatatacatttgaatagtaga

SEQ ID NO: 77221 - DNA, 40 bp, Homo sapiens
tctactattcaaatgtatattttatacttttgggaaatac

SEQ ID NO: 77222 - DNA, 40 bp, Homo sapiens
tatttcccaaaagtataaaatatacatttgaatagtagac

SEQ ID NO: 77223 - DNA, 40 bp, Homo sapiens
gtctactattcaaatgtatattttatacttttgggaaata

SEQ ID NO: 77224 - DNA, 40 bp, Homo sapiens
atttcccaaaagtataaaatatacatttgaatagtagact

SEQ ID NO: 77225 - DNA, 40 bp, Homo sapiens
agtctactattcaaatgtatattttatacttttgggaaat

SEQ ID NO: 77226 - DNA, 40 bp, Homo sapiens
tttcccaaaagtataaaatatacatttgaatagtagactc

SEQ ID NO: 77227 - DNA, 40 bp, Homo sapiens
gagtctactattcaaatgtatattttatacttttgggaaa

SEQ ID NO: 77228 - DNA, 40 bp, Homo sapiens
ttcccaaaagtataaaatatacatttgaatagtagactca

SEQ ID NO: 77229 - DNA, 40 bp, Homo sapiens
tgagtctactattcaaatgtatattttatacttttgggaa

SEQ ID NO: 77230 - DNA, 40 bp, Homo sapiens
tcccaaaagtataaaatatacatttgaatagtagactcaa

SEQ ID NO: 77231 - DNA, 40 bp, Homo sapiens
ttgagtctactattcaaatgtatattttatacttttggga

SEQ ID NO: 77232 - DNA, 40 bp, Homo sapiens
cccaaaagtataaaatatacatttgaatagtagactcaat

SEQ ID NO: 77233 - DNA, 40 bp, Homo sapiens
attgagtctactattcaaatgtatattttatacttttggg

SEQ ID NO: 77234 - DNA, 40 bp, Homo sapiens
ccaaaagtataaaatatacatttgaatagtagactcaatc

SEQ ID NO: 77235 - DNA, 40 bp, Homo sapiens
gattgagtctactattcaaatgtatattttatacttttgg

SEQ ID NO: 77236 - DNA, 40 bp, Homo sapiens
caaaagtataaaatatacatttgaatagtagactcaatcc

SEQ ID NO: 77237 - DNA, 40 bp, Homo sapiens
ggattgagtctactattcaaatgtatattttatacttttg

SEQ ID NO: 77238 - DNA, 40 bp, Homo sapiens
aaaagtataaaatatacatttgaatagtagactcaatccc

SEQ ID NO: 77239 - DNA, 40 bp, Homo sapiens
gggattgagtctactattcaaatgtatattttatactttt

SEQ ID NO: 77240 - DNA, 40 bp, Homo sapiens
aaagtataaaatatacatttgaatagtagactcaatccca

SEQ ID NO: 77241 - DNA, 40 bp, Homo sapiens
tgggattgagtctactattcaaatgtatattttatacttt

SEQ ID NO: 77242 - DNA, 40 bp, Homo sapiens
aagtataaaatatacatttgaatagtagactcaatcccaa

SEQ ID NO: 77243 - DNA, 40 bp, Homo sapiens
ttgggattgagtctactattcaaatgtatattttatactt

SEQ ID NO: 77244 - DNA, 40 bp, Homo sapiens
agtataaaatatacatttgaatagtagactcaatcccaaa

SEQ ID NO: 77245 - DNA, 40 bp, Homo sapiens
tttgggattgagtctactattcaaatgtatattttatact

SEQ ID NO: 77246 - DNA, 40 bp, Homo sapiens
gtataaaatatacatttgaatagtagactcaatcccaaaa

SEQ ID NO: 77247 - DNA, 40 bp, Homo sapiens
ttttgggattgagtctactattcaaatgtatattttatac

SEQ ID NO: 77248 - DNA, 40 bp, Homo sapiens
tataaaatatacatttgaatagtagactcaatcccaaaag

SEQ ID NO: 77249 - DNA, 40 bp, Homo sapiens
cttttgggattgagtctactattcaaatgtatattttata

SEQ ID NO: 77250 - DNA, 40 bp, Homo sapiens
ataaaatatacatttgaatagtagactcaatcccaaaaga

SEQ ID NO: 77251 - DNA, 40 bp, Homo sapiens
tcttttgggattgagtctactattcaaatgtatattttat

SEQ ID NO: 77252 - DNA, 40 bp, Homo sapiens
taaaatatacatttgaatagtagactcaatcccaaaagat

SEQ ID NO: 77253 - DNA, 40 bp, Homo sapiens
atcttttgggattgagtctactattcaaatgtatatttta

SEQ ID NO: 77254 - DNA, 40 bp, Homo sapiens
aaaatatacatttgaatagtagactcaatcccaaaagata

SEQ ID NO: 77255 - DNA, 40 bp, Homo sapiens
tatcttttgggattgagtctactattcaaatgtatatttt

SEQ ID NO: 77256 - DNA, 40 bp, Homo sapiens
aaatatacatttgaatagtagactcaatcccaaaagatac

SEQ ID NO: 77257 - DNA, 40 bp, Homo sapiens
gtatcttttgggattgagtctactattcaaatgtatattt

SEQ ID NO: 77258 - DNA, 40 bp, Homo sapiens
aatatacatttgaatagtagactcaatcccaaaagatact

SEQ ID NO: 77259 - DNA, 40 bp, Homo sapiens
agtatcttttgggattgagtctactattcaaatgtatatt

SEQ ID NO: 77260 - DNA, 40 bp, Homo sapiens
atatacatttgaatagtagactcaatcccaaaagatacta

SEQ ID NO: 77261 - DNA, 40 bp, Homo sapiens
tagtatcttttgggattgagtctactattcaaatgtatat

SEQ ID NO: 77262 - DNA, 40 bp, Homo sapiens
tatacatttgaatagtagactcaatcccaaaagatactac

SEQ ID NO: 77263 - DNA, 40 bp, Homo sapiens
gtagtatcttttgggattgagtctactattcaaatgtata

SEQ ID NO: 77264 - DNA, 40 bp, Homo sapiens
atacatttgaatagtagactcaatcccaaaagatactacg

SEQ ID NO: 77265 - DNA, 40 bp, Homo sapiens
cgtagtatcttttgggattgagtctactattcaaatgtat

SEQ ID NO: 77266 - DNA, 40 bp, Homo sapiens
tacatttgaatagtagactcaatcccaaaagatactacgt

SEQ ID NO: 77267 - DNA, 40 bp, Homo sapiens
acgtagtatcttttgggattgagtctactattcaaatgta

SEQ ID NO: 77268 - DNA, 40 bp, Homo sapiens
acatttgaatagtagactcaatcccaaaagatactacgtg

SEQ ID NO: 77269 - DNA, 40 bp, Homo sapiens
cacgtagtatcttttgggattgagtctactattcaaatgt

SEQ ID NO: 77270 - DNA, 40 bp, Homo sapiens
catttgaatagtagactcaatcccaaaagatactacgtgg

SEQ ID NO: 77271 - DNA, 40 bp, Homo sapiens
ccacgtagtatcttttgggattgagtctactattcaaatg

SEQ ID NO: 77272 - DNA, 40 bp, Homo sapiens
atttgaatagtagactcaatcccaaaagatactacgtggt

SEQ ID NO: 77273 - DNA, 40 bp, Homo sapiens
accacgtagtatcttttgggattgagtctactattcaaat

SEQ ID NO: 77274 - DNA, 40 bp, Homo sapiens
tttgaatagtagactcaatcccaaaagatactacgtggtg

SEQ ID NO: 77275 - DNA, 40 bp, Homo sapiens
caccacgtagtatcttttgggattgagtctactattcaaa

SEQ ID NO: 77276 - DNA, 40 bp, Homo sapiens
ttgaatagtagactcaatcccaaaagatactacgtggtgt

SEQ ID NO: 77277 - DNA, 40 bp, Homo sapiens
acaccacgtagtatcttttgggattgagtctactattcaa

SEQ ID NO: 77278 - DNA, 40 bp, Homo sapiens
tgaatagtagactcaatcccaaaagatactacgtggtgta

SEQ ID NO: 77279 - DNA, 40 bp, Homo sapiens
tacaccacgtagtatcttttgggattgagtctactattca

SEQ ID NO: 77280 - DNA, 40 bp, Homo sapiens
gaatagtagactcaatcccaaaagatactacgtggtgtac

SEQ ID NO: 77281 - DNA, 40 bp, Homo sapiens
gtacaccacgtagtatcttttgggattgagtctactattc

SEQ ID NO: 77282 - DNA, 40 bp, Homo sapiens
aatagtagactcaatcccaaaagatactacgtggtgtact

SEQ ID NO: 77283 - DNA, 40 bp, Homo sapiens
agtacaccacgtagtatcttttgggattgagtctactatt

SEQ ID NO: 77284 - DNA, 40 bp, Homo sapiens
atagtagactcaatcccaaaagatactacgtggtgtacta

SEQ ID NO: 77285 - DNA, 40 bp, Homo sapiens
tagtacaccacgtagtatcttttgggattgagtctactat

SEQ ID NO: 77286 - DNA, 40 bp, Homo sapiens
tagtagactcaatcccaaaagatactacgtggtgtactaa

SEQ ID NO: 77287 - DNA, 40 bp, Homo sapiens
ttagtacaccacgtagtatcttttgggattgagtctacta

SEQ ID NO: 77288 - DNA, 40 bp, Homo sapiens
agtagactcaatcccaaaagatactacgtggtgtactaat

SEQ ID NO: 77289 - DNA, 40 bp, Homo sapiens
attagtacaccacgtagtatcttttgggattgagtctact

SEQ ID NO: 77290 - DNA, 40 bp, Homo sapiens
gtagactcaatcccaaaagatactacgtggtgtactaatc

SEQ ID NO: 77291 - DNA, 40 bp, Homo sapiens
gattagtacaccacgtagtatcttttgggattgagtctac

SEQ ID NO: 77292 - DNA, 40 bp, Homo sapiens
tagactcaatcccaaaagatactacgtggtgtactaatct

SEQ ID NO: 77293 - DNA, 40 bp, Homo sapiens
agattagtacaccacgtagtatcttttgggattgagtcta

SEQ ID NO: 77294 - DNA, 40 bp, Homo sapiens
agactcaatcccaaaagatactacgtggtgtactaatcta

SEQ ID NO: 77295 - DNA, 40 bp, Homo sapiens
tagattagtacaccacgtagtatcttttgggattgagtct

SEQ ID NO: 77296 - DNA, 40 bp, Homo sapiens
gactcaatcccaaaagatactacgtggtgtactaatctac

SEQ ID NO: 77297 - DNA, 40 bp, Homo sapiens
gtagattagtacaccacgtagtatcttttgggattgagtc

SEQ ID NO: 77298 - DNA, 40 bp, Homo sapiens
actcaatcccaaaagatactacgtggtgtactaatctact

SEQ ID NO: 77299 - DNA, 40 bp, Homo sapiens
agtagattagtacaccacgtagtatcttttgggattgagt

SEQ ID NO: 77300 - DNA, 40 bp, Homo sapiens
ctcaatcccaaaagatactacgtggtgtactaatctacta

SEQ ID NO: 77301 - DNA, 40 bp, Homo sapiens
tagtagattagtacaccacgtagtatcttttgggattgag

SEQ ID NO: 77302 - DNA, 40 bp, Homo sapiens
tcaatcccaaaagatactacgtggtgtactaatctactaa

SEQ ID NO: 77303 - DNA, 40 bp, Homo sapiens
ttagtagattagtacaccacgtagtatcttttgggattga

SEQ ID NO: 77304 - DNA, 40 bp, Homo sapiens
caatcccaaaagatactacgtggtgtactaatctactaaa

SEQ ID NO: 77305 - DNA, 40 bp, Homo sapiens
tttagtagattagtacaccacgtagtatcttttgggattg

SEQ ID NO: 77306 - DNA, 40 bp, Homo sapiens
aatcccaaaagatactacgtggtgtactaatctactaaac

SEQ ID NO: 77307 - DNA, 40 bp, Homo sapiens
gtttagtagattagtacaccacgtagtatcttttgggatt

SEQ ID NO: 77308 - DNA, 40 bp, Homo sapiens
atcccaaaagatactacgtggtgtactaatctactaaact

SEQ ID NO: 77309 - DNA, 40 bp, Homo sapiens
agtttagtagattagtacaccacgtagtatcttttgggat

SEQ ID NO: 77310 - DNA, 40 bp, Homo sapiens
tcccaaaagatactacgtggtgtactaatctactaaactc

SEQ ID NO: 77311 - DNA, 40 bp, Homo sapiens
gagtttagtagattagtacaccacgtagtatcttttggga

SEQ ID NO: 77312 - DNA, 40 bp, Homo sapiens
cccaaaagatactacgtggtgtactaatctactaaactca

SEQ ID NO: 77313 - DNA, 40 bp, Homo sapiens
tgagtttagtagattagtacaccacgtagtatcttttggg

SEQ ID NO: 77314 - DNA, 40 bp, Homo sapiens
ccaaaagatactacgtggtgtactaatctactaaactcag

SEQ ID NO: 77315 - DNA, 40 bp, Homo sapiens
ctgagtttagtagattagtacaccacgtagtatcttttgg

SEQ ID NO: 77316 - DNA, 40 bp, Homo sapiens
caaaagatactacgtggtgtactaatctactaaactcaga

SEQ ID NO: 77317 - DNA, 40 bp, Homo sapiens
tctgagtttagtagattagtacaccacgtagtatcttttg

SEQ ID NO: 77318 - DNA, 40 bp, Homo sapiens
aaaagatactacgtggtgtactaatctactaaactcagaa

SEQ ID NO: 77319 - DNA, 40 bp, Homo sapiens
ttctgagtttagtagattagtacaccacgtagtatctttt

SEQ ID NO: 77320 - DNA, 40 bp, Homo sapiens
aaagatactacgtggtgtactaatctactaaactcagaaa

SEQ ID NO: 77321 - DNA, 40 bp, Homo sapiens
tttctgagtttagtagattagtacaccacgtagtatcttt

SEQ ID NO: 77322 - DNA, 40 bp, Homo sapiens
aagatactacgtggtgtactaatctactaaactcagaaac

SEQ ID NO: 77323 - DNA, 40 bp, Homo sapiens
gtttctgagtttagtagattagtacaccacgtagtatctt

SEQ ID NO: 77324 - DNA, 40 bp, Homo sapiens
agatactacgtggtgtactaatctactaaactcagaaaca

SEQ ID NO: 77325 - DNA, 40 bp, Homo sapiens
tgtttctgagtttagtagattagtacaccacgtagtatct

SEQ ID NO: 77326 - DNA, 40 bp, Homo sapiens
gatactacgtggtgtactaatctactaaactcagaaacaa

SEQ ID NO: 77327 - DNA, 40 bp, Homo sapiens
ttgtttctgagtttagtagattagtacaccacgtagtatc

SEQ ID NO: 77328 - DNA, 40 bp, Homo sapiens
atactacgtggtgtactaatctactaaactcagaaacaaa

SEQ ID NO: 77329 - DNA, 40 bp, Homo sapiens
tttgtttctgagtttagtagattagtacaccacgtagtat

SEQ ID NO: 77330 - DNA, 40 bp, Homo sapiens
tactacgtggtgtactaatctactaaactcagaaacaaag

SEQ ID NO: 77331 - DNA, 40 bp, Homo sapiens
ctttgtttctgagtttagtagattagtacaccacgtagta

SEQ ID NO: 77332 - DNA, 40 bp, Homo sapiens
actacgtggtgtactaatctactaaactcagaaacaaagc

SEQ ID NO: 77333 - DNA, 40 bp, Homo sapiens
gctttgtttctgagtttagtagattagtacaccacgtagt

SEQ ID NO: 77334 - DNA, 40 bp, Homo sapiens
ctacgtggtgtactaatctactaaactcagaaacaaagca

SEQ ID NO: 77335 - DNA, 40 bp, Homo sapiens
tgctttgtttctgagtttagtagattagtacaccacgtag

SEQ ID NO: 77336 - DNA, 40 bp, Homo sapiens
tacgtggtgtactaatctactaaactcagaaacaaagcat

SEQ ID NO: 77337 - DNA, 40 bp, Homo sapiens
atgctttgtttctgagtttagtagattagtacaccacgta

SEQ ID NO: 77338 - DNA, 40 bp, Homo sapiens
acgtggtgtactaatctactaaactcagaaacaaagcatg

SEQ ID NO: 77339 - DNA, 40 bp, Homo sapiens
catgctttgtttctgagtttagtagattagtacaccacgt

SEQ ID NO: 77340 - DNA, 40 bp, Homo sapiens
cgtggtgtactaatctactaaactcagaaacaaagcatga

SEQ ID NO: 77341 - DNA, 40 bp, Homo sapiens
tcatgctttgtttctgagtttagtagattagtacaccacg

SEQ ID NO: 77342 - DNA, 40 bp, Homo sapiens
gtggtgtactaatctactaaactcagaaacaaagcatgac

SEQ ID NO: 77343 - DNA, 40 bp, Homo sapiens
gtcatgctttgtttctgagtttagtagattagtacaccac

SEQ ID NO: 77344 - DNA, 40 bp, Homo sapiens
tggtgtactaatctactaaactcagaaacaaagcatgact

SEQ ID NO: 77345 - DNA, 40 bp, Homo sapiens
agtcatgctttgtttctgagtttagtagattagtacacca

SEQ ID NO: 77346 - DNA, 40 bp, Homo sapiens
ggtgtactaatctactaaactcagaaacaaagcatgactg

SEQ ID NO: 77347 - DNA, 40 bp, Homo sapiens
cagtcatgctttgtttctgagtttagtagattagtacacc

SEQ ID NO: 77348 - DNA, 40 bp, Homo sapiens
gtgtactaatctactaaactcagaaacaaagcatgactgg

SEQ ID NO: 77349 - DNA, 40 bp, Homo sapiens
ccagtcatgctttgtttctgagtttagtagattagtacac

SEQ ID NO: 77350 - DNA, 40 bp, Homo sapiens
tgtactaatctactaaactcagaaacaaagcatgactggc

SEQ ID NO: 77351 - DNA, 40 bp, Homo sapiens
gccagtcatgctttgtttctgagtttagtagattagtaca

SEQ ID NO: 77352 - DNA, 40 bp, Homo sapiens
gtactaatctactaaactcagaaacaaagcatgactggca

SEQ ID NO: 77353 - DNA, 40 bp, Homo sapiens
tgccagtcatgctttgtttctgagtttagtagattagtac

SEQ ID NO: 77354 - DNA, 40 bp, Homo sapiens
tactaatctactaaactcagaaacaaagcatgactggcat

SEQ ID NO: 77355 - DNA, 40 bp, Homo sapiens
atgccagtcatgctttgtttctgagtttagtagattagta

SEQ ID NO: 77356 - DNA, 40 bp, Homo sapiens
actaatctactaaactcagaaacaaagcatgactggcatt

SEQ ID NO: 77357 - DNA, 40 bp, Homo sapiens
aatgccagtcatgctttgtttctgagtttagtagattagt

SEQ ID NO: 77358 - DNA, 40 bp, Homo sapiens
ctaatctactaaactcagaaacaaagcatgactggcatta

SEQ ID NO: 77359 - DNA, 40 bp, Homo sapiens
taatgccagtcatgctttgtttctgagtttagtagattag

SEQ ID NO: 77360 - DNA, 40 bp, Homo sapiens
taatctactaaactcagaaacaaagcatgactggcattaa

SEQ ID NO: 77361 - DNA, 40 bp, Homo sapiens
ttaatgccagtcatgctttgtttctgagtttagtagatta

SEQ ID NO: 77362 - DNA, 40 bp, Homo sapiens
aatctactaaactcagaaacaaagcatgactggcattaat

SEQ ID NO: 77363 - DNA, 40 bp, Homo sapiens
attaatgccagtcatgctttgtttctgagtttagtagatt

SEQ ID NO: 77364 - DNA, 40 bp, Homo sapiens
atctactaaactcagaaacaaagcatgactggcattaatt

SEQ ID NO: 77365 - DNA, 40 bp, Homo sapiens
aattaatgccagtcatgctttgtttctgagtttagtagat

SEQ ID NO: 77366 - DNA, 40 bp, Homo sapiens
tctactaaactcagaaacaaagcatgactggcattaattt

SEQ ID NO: 77367 - DNA, 40 bp, Homo sapiens
aaattaatgccagtcatgctttgtttctgagtttagtaga

SEQ ID NO: 77368 - DNA, 40 bp, Homo sapiens
ctactaaactcagaaacaaagcatgactggcattaatttt

SEQ ID NO: 77369 - DNA, 40 bp, Homo sapiens
aaaattaatgccagtcatgctttgtttctgagtttagtag

SEQ ID NO: 77370 - DNA, 40 bp, Homo sapiens
tactaaactcagaaacaaagcatgactggcattaattttt

SEQ ID NO: 77371 - DNA, 40 bp, Homo sapiens
aaaaattaatgccagtcatgctttgtttctgagtttagta

SEQ ID NO: 77372 - DNA, 40 bp, Homo sapiens
actaaactcagaaacaaagcatgactggcattaatttttg

SEQ ID NO: 77373 - DNA, 40 bp, Homo sapiens
caaaaattaatgccagtcatgctttgtttctgagtttagt

SEQ ID NO: 77374 - DNA, 40 bp, Homo sapiens
ctaaactcagaaacaaagcatgactggcattaatttttgt

SEQ ID NO: 77375 - DNA, 40 bp, Homo sapiens
acaaaaattaatgccagtcatgctttgtttctgagtttag

SEQ ID NO: 77376 - DNA, 40 bp, Homo sapiens
taaactcagaaacaaagcatgactggcattaatttttgtt

SEQ ID NO: 77377 - DNA, 40 bp, Homo sapiens
aacaaaaattaatgccagtcatgctttgtttctgagttta

SEQ ID NO: 77378 - DNA, 40 bp, Homo sapiens
aaactcagaaacaaagcatgactggcattaatttttgttg

SEQ ID NO: 77379 - DNA, 40 bp, Homo sapiens
caacaaaaattaatgccagtcatgctttgtttctgagttt

SEQ ID NO: 77380 - DNA, 40 bp, Homo sapiens
aactcagaaacaaagcatgactggcattaatttttgttga

SEQ ID NO: 77381 - DNA, 40 bp, Homo sapiens
tcaacaaaaattaatgccagtcatgctttgtttctgagtt

SEQ ID NO: 77382 - DNA, 40 bp, Homo sapiens
actcagaaacaaagcatgactggcattaatttttgttgaa

SEQ ID NO: 77383 - DNA, 40 bp, Homo sapiens
ttcaacaaaaattaatgccagtcatgctttgtttctgagt

SEQ ID NO: 77384 - DNA, 40 bp, Homo sapiens
ctcagaaacaaagcatgactggcattaatttttgttgaaa

SEQ ID NO: 77385 - DNA, 40 bp, Homo sapiens
tttcaacaaaaattaatgccagtcatgctttgtttctgag

SEQ ID NO: 77386 - DNA, 40 bp, Homo sapiens
tcagaaacaaagcatgactggcattaatttttgttgaaat

SEQ ID NO: 77387 - DNA, 40 bp, Homo sapiens
atttcaacaaaaattaatgccagtcatgctttgtttctga

SEQ ID NO: 77388 - DNA, 40 bp, Homo sapiens
cagaaacaaagcatgactggcattaatttttgttgaaatt

SEQ ID NO: 77389 - DNA, 40 bp, Homo sapiens
aatttcaacaaaaattaatgccagtcatgctttgtttctg

SEQ ID NO: 77390 - DNA, 40 bp, Homo sapiens
agaaacaaagcatgactggcattaatttttgttgaaattt

SEQ ID NO: 77391 - DNA, 40 bp, Homo sapiens
aaatttcaacaaaaattaatgccagtcatgctttgtttct

SEQ ID NO: 77392 - DNA, 40 bp, Homo sapiens
gaaacaaagcatgactggcattaatttttgttgaaattta

SEQ ID NO: 77393 - DNA, 40 bp, Homo sapiens
taaatttcaacaaaaattaatgccagtcatgctttgtttc

SEQ ID NO: 77394 - DNA, 40 bp, Homo sapiens
aaacaaagcatgactggcattaatttttgttgaaatttat

SEQ ID NO: 77395 - DNA, 40 bp, Homo sapiens
ataaatttcaacaaaaattaatgccagtcatgctttgttt

SEQ ID NO: 77396 - DNA, 40 bp, Homo sapiens
aacaaagcatgactggcattaatttttgttgaaatttatg

SEQ ID NO: 77397 - DNA, 40 bp, Homo sapiens
cataaatttcaacaaaaattaatgccagtcatgctttgtt

SEQ ID NO: 77398 - DNA, 40 bp, Homo sapiens
acaaagcatgactggcattaatttttgttgaaatttatga

SEQ ID NO: 77399 - DNA, 40 bp, Homo sapiens
tcataaatttcaacaaaaattaatgccagtcatgctttgt

SEQ ID NO: 77400 - DNA, 40 bp, Homo sapiens
caaagcatgactggcattaatttttgttgaaatttatgaa

SEQ ID NO: 77401 - DNA, 40 bp, Homo sapiens
ttcataaatttcaacaaaaattaatgccagtcatgctttg

SEQ ID NO: 77402 - DNA, 40 bp, Homo sapiens
aaagcatgactggcattaatttttgttgaaatttatgaac

SEQ ID NO: 77403 - DNA, 40 bp, Homo sapiens
gttcataaatttcaacaaaaattaatgccagtcatgcttt

SEQ ID NO: 77404 - DNA, 40 bp, Homo sapiens
aagcatgactggcattaatttttgttgaaatttatgaact

SEQ ID NO: 77405 - DNA, 40 bp, Homo sapiens
agttcataaatttcaacaaaaattaatgccagtcatgctt

SEQ ID NO: 77406 - DNA, 40 bp, Homo sapiens
agcatgactggcattaatttttgttgaaatttatgaactc

SEQ ID NO: 77407 - DNA, 40 bp, Homo sapiens
gagttcataaatttcaacaaaaattaatgccagtcatgct

SEQ ID NO: 77408 - DNA, 40 bp, Homo sapiens
gcatgactggcattaatttttgttgaaatttatgaactct

SEQ ID NO: 77409 - DNA, 40 bp, Homo sapiens
agagttcataaatttcaacaaaaattaatgccagtcatgc

SEQ ID NO: 77410 - DNA, 40 bp, Homo sapiens
catgactggcattaatttttgttgaaatttatgaactctg

SEQ ID NO: 77411 - DNA, 40 bp, Homo sapiens
cagagttcataaatttcaacaaaaattaatgccagtcatg

SEQ ID NO: 77412 - DNA, 40 bp, Homo sapiens
atgactggcattaatttttgttgaaatttatgaactctga

SEQ ID NO: 77413 - DNA, 40 bp, Homo sapiens
tcagagttcataaatttcaacaaaaattaatgccagtcat

SEQ ID NO: 77414 - DNA, 40 bp, Homo sapiens
tgactggcattaatttttgttgaaatttatgaactctgaa

SEQ ID NO: 77415 - DNA, 40 bp, Homo sapiens
ttcagagttcataaatttcaacaaaaattaatgccagtca

SEQ ID NO: 77416 - DNA, 40 bp, Homo sapiens
gactggcattaatttttgttgaaatttatgaactctgaat

SEQ ID NO: 77417 - DNA, 40 bp, Homo sapiens
attcagagttcataaatttcaacaaaaattaatgccagtc

SEQ ID NO: 77418 - DNA, 40 bp, Homo sapiens
actggcattaatttttgttgaaatttatgaactctgaatg

SEQ ID NO: 77419 - DNA, 40 bp, Homo sapiens
cattcagagttcataaatttcaacaaaaattaatgccagt

SEQ ID NO: 77420 - DNA, 40 bp, Homo sapiens
ctggcattaatttttgttgaaatttatgaactctgaatgt

SEQ ID NO: 77421 - DNA, 40 bp, Homo sapiens
acattcagagttcataaatttcaacaaaaattaatgccag

SEQ ID NO: 77422 - DNA, 40 bp, Homo sapiens
tggcattaatttttgttgaaatttatgaactctgaatgtt

SEQ ID NO: 77423 - DNA, 40 bp, Homo sapiens
aacattcagagttcataaatttcaacaaaaattaatgcca

SEQ ID NO: 77424 - DNA, 40 bp, Homo sapiens
ggcattaatttttgttgaaatttatgaactctgaatgttt

SEQ ID NO: 77425 - DNA, 40 bp, Homo sapiens
aaacattcagagttcataaatttcaacaaaaattaatgcc

SEQ ID NO: 77426 - DNA, 40 bp, Homo sapiens
gcattaatttttgttgaaatttatgaactctgaatgtttt

SEQ ID NO: 77427 - DNA, 40 bp, Homo sapiens
aaaacattcagagttcataaatttcaacaaaaattaatgc

SEQ ID NO: 77428 - DNA, 40 bp, Homo sapiens
cattaatttttgttgaaatttatgaactctgaatgttttt

SEQ ID NO: 77429 - DNA, 40 bp, Homo sapiens
aaaaacattcagagttcataaatttcaacaaaaattaatg

SEQ ID NO: 77430 - DNA, 40 bp, Homo sapiens
attaatttttgttgaaatttatgaactctgaatgtttttg

SEQ ID NO: 77431 - DNA, 40 bp, Homo sapiens
caaaaacattcagagttcataaatttcaacaaaaattaat

SEQ ID NO: 77432 - DNA, 40 bp, Homo sapiens
ttaatttttgttgaaatttatgaactctgaatgtttttga

SEQ ID NO: 77433 - DNA, 40 bp, Homo sapiens
tcaaaaacattcagagttcataaatttcaacaaaaattaa

SEQ ID NO: 77434 - DNA, 40 bp, Homo sapiens
taatttttgttgaaatttatgaactctgaatgtttttgaa

SEQ ID NO: 77435 - DNA, 40 bp, Homo sapiens
ttcaaaaacattcagagttcataaatttcaacaaaaatta

SEQ ID NO: 77436 - DNA, 40 bp, Homo sapiens
aatttttgttgaaatttatgaactctgaatgtttttgaat

SEQ ID NO: 77437 - DNA, 40 bp, Homo sapiens
attcaaaaacattcagagttcataaatttcaacaaaaatt

SEQ ID NO: 77438 - DNA, 40 bp, Homo sapiens
atttttgttgaaatttatgaactctgaatgtttttgaata

SEQ ID NO: 77439 - DNA, 40 bp, Homo sapiens
tattcaaaaacattcagagttcataaatttcaacaaaaat

SEQ ID NO: 77440 - DNA, 40 bp, Homo sapiens
tttttgttgaaatttatgaactctgaatgtttttgaatat

SEQ ID NO: 77441 - DNA, 40 bp, Homo sapiens
atattcaaaaacattcagagttcataaatttcaacaaaaa

SEQ ID NO: 77442 - DNA, 40 bp, Homo sapiens
ttttgttgaaatttatgaactctgaatgtttttgaatatc

SEQ ID NO: 77443 - DNA, 40 bp, Homo sapiens
gatattcaaaaacattcagagttcataaatttcaacaaaa

SEQ ID NO: 77444 - DNA, 40 bp, Homo sapiens
tttgttgaaatttatgaactctgaatgtttttgaatatca

SEQ ID NO: 77445 - DNA, 40 bp, Homo sapiens
tgatattcaaaaacattcagagttcataaatttcaacaaa

SEQ ID NO: 77446 - DNA, 40 bp, Homo sapiens
ttgttgaaatttatgaactctgaatgtttttgaatatcat

SEQ ID NO: 77447 - DNA, 40 bp, Homo sapiens
atgatattcaaaaacattcagagttcataaatttcaacaa

SEQ ID NO: 77448 - DNA, 40 bp, Homo sapiens
tgttgaaatttatgaactctgaatgtttttgaatatcatt

SEQ ID NO: 77449 - DNA, 40 bp, Homo sapiens
aatgatattcaaaaacattcagagttcataaatttcaaca

SEQ ID NO: 77450 - DNA, 40 bp, Homo sapiens
gttgaaatttatgaactctgaatgtttttgaatatcattc

SEQ ID NO: 77451 - DNA, 40 bp, Homo sapiens
gaatgatattcaaaaacattcagagttcataaatttcaac

SEQ ID NO: 77452 - DNA, 40 bp, Homo sapiens
ttgaaatttatgaactctgaatgtttttgaatatcattct

SEQ ID NO: 77453 - DNA, 40 bp, Homo sapiens
agaatgatattcaaaaacattcagagttcataaatttcaa

SEQ ID NO: 77454 - DNA, 40 bp, Homo sapiens
tgaaatttatgaactctgaatgtttttgaatatcattctg

SEQ ID NO: 77455 - DNA, 40 bp, Homo sapiens
cagaatgatattcaaaaacattcagagttcataaatttca

SEQ ID NO: 77456 - DNA, 40 bp, Homo sapiens
gaaatttatgaactctgaatgtttttgaatatcattctgt

SEQ ID NO: 77457 - DNA, 40 bp, Homo sapiens
acagaatgatattcaaaaacattcagagttcataaatttc

SEQ ID NO: 77458 - DNA, 40 bp, Homo sapiens
aaatttatgaactctgaatgtttttgaatatcattctgta

SEQ ID NO: 77459 - DNA, 40 bp, Homo sapiens
tacagaatgatattcaaaaacattcagagttcataaattt

SEQ ID NO: 77460 - DNA, 40 bp, Homo sapiens
aatttatgaactctgaatgtttttgaatatcattctgtaa

SEQ ID NO: 77461 - DNA, 40 bp, Homo sapiens
ttacagaatgatattcaaaaacattcagagttcataaatt

SEQ ID NO: 77462 - DNA, 40 bp, Homo sapiens
atttatgaactctgaatgtttttgaatatcattctgtaaa

SEQ ID NO: 77463 - DNA, 40 bp, Homo sapiens
tttacagaatgatattcaaaaacattcagagttcataaat

SEQ ID NO: 77464 - DNA, 40 bp, Homo sapiens
tttatgaactctgaatgtttttgaatatcattctgtaaag

SEQ ID NO: 77465 - DNA, 40 bp, Homo sapiens
ctttacagaatgatattcaaaaacattcagagttcataaa

SEQ ID NO: 77466 - DNA, 40 bp, Homo sapiens
ttatgaactctgaatgtttttgaatatcattctgtaaagc

SEQ ID NO: 77467 - DNA, 40 bp, Homo sapiens
gctttacagaatgatattcaaaaacattcagagttcataa

SEQ ID NO: 77468 - DNA, 40 bp, Homo sapiens
tatgaactctgaatgtttttgaatatcattctgtaaagca

SEQ ID NO: 77469 - DNA, 40 bp, Homo sapiens
tgctttacagaatgatattcaaaaacattcagagttcata

SEQ ID NO: 77470 - DNA, 40 bp, Homo sapiens
atgaactctgaatgtttttgaatatcattctgtaaagcaa

SEQ ID NO: 77471 - DNA, 40 bp, Homo sapiens
ttgctttacagaatgatattcaaaaacattcagagttcat

SEQ ID NO: 77472 - DNA, 40 bp, Homo sapiens
tgaactctgaatgtttttgaatatcattctgtaaagcaat

SEQ ID NO: 77473 - DNA, 40 bp, Homo sapiens
attgctttacagaatgatattcaaaaacattcagagttca

SEQ ID NO: 77474 - DNA, 40 bp, Homo sapiens
gaactctgaatgtttttgaatatcattctgtaaagcaata

SEQ ID NO: 77475 - DNA, 40 bp, Homo sapiens
tattgctttacagaatgatattcaaaaacattcagagttc

SEQ ID NO: 77476 - DNA, 40 bp, Homo sapiens
aactctgaatgtttttgaatatcattctgtaaagcaatat

SEQ ID NO: 77477 - DNA, 40 bp, Homo sapiens
atattgctttacagaatgatattcaaaaacattcagagtt

SEQ ID NO: 77478 - DNA, 40 bp, Homo sapiens
actctgaatgtttttgaatatcattctgtaaagcaatatt

SEQ ID NO: 77479 - DNA, 40 bp, Homo sapiens
aatattgctttacagaatgatattcaaaaacattcagagt

SEQ ID NO: 77480 - DNA, 40 bp, Homo sapiens
ctctgaatgtttttgaatatcattctgtaaagcaatattt

SEQ ID NO: 77481 - DNA, 40 bp, Homo sapiens
aaatattgctttacagaatgatattcaaaaacattcagag

SEQ ID NO: 77482 - DNA, 40 bp, Homo sapiens
tctgaatgtttttgaatatcattctgtaaagcaatatttt

SEQ ID NO: 77483 - DNA, 40 bp, Homo sapiens
aaaatattgctttacagaatgatattcaaaaacattcaga

SEQ ID NO: 77484 - DNA, 40 bp, Homo sapiens
ctgaatgtttttgaatatcattctgtaaagcaatattttg

SEQ ID NO: 77485 - DNA, 40 bp, Homo sapiens
caaaatattgctttacagaatgatattcaaaaacattcag

SEQ ID NO: 77486 - DNA, 40 bp, Homo sapiens
tgaatgtttttgaatatcattctgtaaagcaatattttgc

SEQ ID NO: 77487 - DNA, 40 bp, Homo sapiens
gcaaaatattgctttacagaatgatattcaaaaacattca

SEQ ID NO: 77488 - DNA, 40 bp, Homo sapiens
gaatgtttttgaatatcattctgtaaagcaatattttgca

SEQ ID NO: 77489 - DNA, 40 bp, Homo sapiens
tgcaaaatattgctttacagaatgatattcaaaaacattc

SEQ ID NO: 77490 - DNA, 40 bp, Homo sapiens
aatgtttttgaatatcattctgtaaagcaatattttgcaa

SEQ ID NO: 77491 - DNA, 40 bp, Homo sapiens
ttgcaaaatattgctttacagaatgatattcaaaaacatt

SEQ ID NO: 77492 - DNA, 40 bp, Homo sapiens
atgtttttgaatatcattctgtaaagcaatattttgcaat

SEQ ID NO: 77493 - DNA, 40 bp, Homo sapiens
attgcaaaatattgctttacagaatgatattcaaaaacat

SEQ ID NO: 77494 - DNA, 40 bp, Homo sapiens
tgtttttgaatatcattctgtaaagcaatattttgcaatt

SEQ ID NO: 77495 - DNA, 40 bp, Homo sapiens
aattgcaaaatattgctttacagaatgatattcaaaaaca

SEQ ID NO: 77496 - DNA, 40 bp, Homo sapiens
gtttttgaatatcattctgtaaagcaatattttgcaatta

SEQ ID NO: 77497 - DNA, 40 bp, Homo sapiens
taattgcaaaatattgctttacagaatgatattcaaaaac

SEQ ID NO: 77498 - DNA, 40 bp, Homo sapiens
tttttgaatatcattctgtaaagcaatattttgcaattaa

SEQ ID NO: 77499 - DNA, 40 bp, Homo sapiens
ttaattgcaaaatattgctttacagaatgatattcaaaaa

SEQ ID NO: 77500 - DNA, 40 bp, Homo sapiens
ttttgaatatcattctgtaaagcaatattttgcaattaaa

SEQ ID NO: 77501 - DNA, 40 bp, Homo sapiens
tttaattgcaaaatattgctttacagaatgatattcaaaa

SEQ ID NO: 77502 - DNA, 40 bp, Homo sapiens
tttgaatatcattctgtaaagcaatattttgcaattaaag

SEQ ID NO: 77503 - DNA, 40 bp, Homo sapiens
ctttaattgcaaaatattgctttacagaatgatattcaaa

SEQ ID NO: 77504 - DNA, 40 bp, Homo sapiens
ttgaatatcattctgtaaagcaatattttgcaattaaagc

SEQ ID NO: 77505 - DNA, 40 bp, Homo sapiens
gctttaattgcaaaatattgctttacagaatgatattcaa

SEQ ID NO: 77506 - DNA, 40 bp, Homo sapiens
tgaatatcattctgtaaagcaatattttgcaattaaagca

SEQ ID NO: 77507 - DNA, 40 bp, Homo sapiens
tgctttaattgcaaaatattgctttacagaatgatattca

SEQ ID NO: 77508 - DNA, 40 bp, Homo sapiens
gaatatcattctgtaaagcaatattttgcaattaaagcaa

SEQ ID NO: 77509 - DNA, 40 bp, Homo sapiens
ttgctttaattgcaaaatattgctttacagaatgatattc

SEQ ID NO: 77510 - DNA, 40 bp, Homo sapiens
aatatcattctgtaaagcaatattttgcaattaaagcaat

SEQ ID NO: 77511 - DNA, 40 bp, Homo sapiens
attgctttaattgcaaaatattgctttacagaatgatatt

SEQ ID NO: 77512 - DNA, 40 bp, Homo sapiens
atatcattctgtaaagcaatattttgcaattaaagcaatt

SEQ ID NO: 77513 - DNA, 40 bp, Homo sapiens
aattgctttaattgcaaaatattgctttacagaatgatat

SEQ ID NO: 77514 - DNA, 40 bp, Homo sapiens
tatcattctgtaaagcaatattttgcaattaaagcaattt

SEQ ID NO: 77515 - DNA, 40 bp, Homo sapiens
aaattgctttaattgcaaaatattgctttacagaatgata

SEQ ID NO: 77516 - DNA, 40 bp, Homo sapiens
atcattctgtaaagcaatattttgcaattaaagcaatttt

SEQ ID NO: 77517 - DNA, 40 bp, Homo sapiens
aaaattgctttaattgcaaaatattgctttacagaatgat

SEQ ID NO: 77518 - DNA, 40 bp, Homo sapiens
tcattctgtaaagcaatattttgcaattaaagcaattttg

SEQ ID NO: 77519 - DNA, 40 bp, Homo sapiens
caaaattgctttaattgcaaaatattgctttacagaatga

SEQ ID NO: 77520 - DNA, 40 bp, Homo sapiens
cattctgtaaagcaatattttgcaattaaagcaattttgc

SEQ ID NO: 77521 - DNA, 40 bp, Homo sapiens
gcaaaattgctttaattgcaaaatattgctttacagaatg

SEQ ID NO: 77522 - DNA, 40 bp, Homo sapiens
attctgtaaagcaatattttgcaattaaagcaattttgca

SEQ ID NO: 77523 - DNA, 40 bp, Homo sapiens
tgcaaaattgctttaattgcaaaatattgctttacagaat

SEQ ID NO: 77524 - DNA, 40 bp, Homo sapiens
ttctgtaaagcaatattttgcaattaaagcaattttgcat

SEQ ID NO: 77525 - DNA, 40 bp, Homo sapiens
atgcaaaattgctttaattgcaaaatattgctttacagaa

SEQ ID NO: 77526 - DNA, 40 bp, Homo sapiens
tctgtaaagcaatattttgcaattaaagcaattttgcatg

SEQ ID NO: 77527 - DNA, 40 bp, Homo sapiens
catgcaaaattgctttaattgcaaaatattgctttacaga

SEQ ID NO: 77528 - DNA, 40 bp, Homo sapiens
ctgtaaagcaatattttgcaattaaagcaattttgcatgt

SEQ ID NO: 77529 - DNA, 40 bp, Homo sapiens
acatgcaaaattgctttaattgcaaaatattgctttacag

SEQ ID NO: 77530 - DNA, 40 bp, Homo sapiens
tgtaaagcaatattttgcaattaaagcaattttgcatgtt

SEQ ID NO: 77531 - DNA, 40 bp, Homo sapiens
aacatgcaaaattgctttaattgcaaaatattgctttaca

SEQ ID NO: 77532 - DNA, 40 bp, Homo sapiens
gtaaagcaatattttgcaattaaagcaattttgcatgtta

SEQ ID NO: 77533 - DNA, 40 bp, Homo sapiens
taacatgcaaaattgctttaattgcaaaatattgctttac

SEQ ID NO: 77534 - DNA, 40 bp, Homo sapiens
taaagcaatattttgcaattaaagcaattttgcatgttaa

SEQ ID NO: 77535 - DNA, 40 bp, Homo sapiens
ttaacatgcaaaattgctttaattgcaaaatattgcttta

SEQ ID NO: 77536 - DNA, 40 bp, Homo sapiens
aaagcaatattttgcaattaaagcaattttgcatgttaaa

SEQ ID NO: 77537 - DNA, 40 bp, Homo sapiens
tttaacatgcaaaattgctttaattgcaaaatattgcttt

SEQ ID NO: 77538 - DNA, 40 bp, Homo sapiens
aagcaatattttgcaattaaagcaattttgcatgttaaat

SEQ ID NO: 77539 - DNA, 40 bp, Homo sapiens
atttaacatgcaaaattgctttaattgcaaaatattgctt

SEQ ID NO: 77540 - DNA, 40 bp, Homo sapiens
agcaatattttgcaattaaagcaattttgcatgttaaatt

SEQ ID NO: 77541 - DNA, 40 bp, Homo sapiens
aatttaacatgcaaaattgctttaattgcaaaatattgct

SEQ ID NO: 77542 - DNA, 40 bp, Homo sapiens
gcaatattttgcaattaaagcaattttgcatgttaaattt

SEQ ID NO: 77543 - DNA, 40 bp, Homo sapiens
aaatttaacatgcaaaattgctttaattgcaaaatattgc

SEQ ID NO: 77544 - DNA, 40 bp, Homo sapiens
caatattttgcaattaaagcaattttgcatgttaaatttt

SEQ ID NO: 77545 - DNA, 40 bp, Homo sapiens
aaaatttaacatgcaaaattgctttaattgcaaaatattg

SEQ ID NO: 77546 - DNA, 40 bp, Homo sapiens
aatattttgcaattaaagcaattttgcatgttaaatttta

SEQ ID NO: 77547 - DNA, 40 bp, Homo sapiens
taaaatttaacatgcaaaattgctttaattgcaaaatatt

SEQ ID NO: 77548 - DNA, 40 bp, Homo sapiens
atattttgcaattaaagcaattttgcatgttaaattttac

SEQ ID NO: 77549 - DNA, 40 bp, Homo sapiens
gtaaaatttaacatgcaaaattgctttaattgcaaaatat

SEQ ID NO: 77550 - DNA, 40 bp, Homo sapiens
tattttgcaattaaagcaattttgcatgttaaattttacc

SEQ ID NO: 77551 - DNA, 40 bp, Homo sapiens
ggtaaaatttaacatgcaaaattgctttaattgcaaaata

SEQ ID NO: 77552 - DNA, 40 bp, Homo sapiens
attttgcaattaaagcaattttgcatgttaaattttacca

SEQ ID NO: 77553 - DNA, 40 bp, Homo sapiens
tggtaaaatttaacatgcaaaattgctttaattgcaaaat

SEQ ID NO: 77554 - DNA, 40 bp, Homo sapiens
ttttgcaattaaagcaattttgcatgttaaattttaccac

SEQ ID NO: 77555 - DNA, 40 bp, Homo sapiens
gtggtaaaatttaacatgcaaaattgctttaattgcaaaa

SEQ ID NO: 77556 - DNA, 40 bp, Homo sapiens
tttgcaattaaagcaattttgcatgttaaattttaccaca

SEQ ID NO: 77557 - DNA, 40 bp, Homo sapiens
tgtggtaaaatttaacatgcaaaattgctttaattgcaaa

SEQ ID NO: 77558 - DNA, 40 bp, Homo sapiens
ttgcaattaaagcaattttgcatgttaaattttaccacaa

SEQ ID NO: 77559 - DNA, 40 bp, Homo sapiens
ttgtggtaaaatttaacatgcaaaattgctttaattgcaa

SEQ ID NO: 77560 - DNA, 40 bp, Homo sapiens
tgcaattaaagcaattttgcatgttaaattttaccacaac

SEQ ID NO: 77561 - DNA, 40 bp, Homo sapiens
gttgtggtaaaatttaacatgcaaaattgctttaattgca

SEQ ID NO: 77562 - DNA, 40 bp, Homo sapiens
gcaattaaagcaattttgcatgttaaattttaccacaacc

SEQ ID NO: 77563 - DNA, 40 bp, Homo sapiens
ggttgtggtaaaatttaacatgcaaaattgctttaattgc

SEQ ID NO: 77564 - DNA, 40 bp, Homo sapiens
caattaaagcaattttgcatgttaaattttaccacaacct

SEQ ID NO: 77565 - DNA, 40 bp, Homo sapiens
aggttgtggtaaaatttaacatgcaaaattgctttaattg

SEQ ID NO: 77566 - DNA, 40 bp, Homo sapiens
aattaaagcaattttgcatgttaaattttaccacaacctc

SEQ ID NO: 77567 - DNA, 40 bp, Homo sapiens
gaggttgtggtaaaatttaacatgcaaaattgctttaatt

SEQ ID NO: 77568 - DNA, 40 bp, Homo sapiens
attaaagcaattttgcatgttaaattttaccacaacctct

SEQ ID NO: 77569 - DNA, 40 bp, Homo sapiens
agaggttgtggtaaaatttaacatgcaaaattgctttaat

SEQ ID NO: 77570 - DNA, 40 bp, Homo sapiens
ttaaagcaattttgcatgttaaattttaccacaacctcta

SEQ ID NO: 77571 - DNA, 40 bp, Homo sapiens
tagaggttgtggtaaaatttaacatgcaaaattgctttaa

SEQ ID NO: 77572 - DNA, 40 bp, Homo sapiens
taaagcaattttgcatgttaaattttaccacaacctctaa

SEQ ID NO: 77573 - DNA, 40 bp, Homo sapiens
ttagaggttgtggtaaaatttaacatgcaaaattgcttta

SEQ ID NO: 77574 - DNA, 40 bp, Homo sapiens
aaagcaattttgcatgttaaattttaccacaacctctaaa

SEQ ID NO: 77575 - DNA, 40 bp, Homo sapiens
tttagaggttgtggtaaaatttaacatgcaaaattgcttt

SEQ ID NO: 77576 - DNA, 40 bp, Homo sapiens
aagcaattttgcatgttaaattttaccacaacctctaaaa

SEQ ID NO: 77577 - DNA, 40 bp, Homo sapiens
ttttagaggttgtggtaaaatttaacatgcaaaattgctt

SEQ ID NO: 77578 - DNA, 40 bp, Homo sapiens
agcaattttgcatgttaaattttaccacaacctctaaaat

SEQ ID NO: 77579 - DNA, 40 bp, Homo sapiens
attttagaggttgtggtaaaatttaacatgcaaaattgct

SEQ ID NO: 77580 - DNA, 40 bp, Homo sapiens
gcaattttgcatgttaaattttaccacaacctctaaaata

SEQ ID NO: 77581 - DNA, 40 bp, Homo sapiens
tattttagaggttgtggtaaaatttaacatgcaaaattgc

SEQ ID NO: 77582 - DNA, 40 bp, Homo sapiens
caattttgcatgttaaattttaccacaacctctaaaatat

SEQ ID NO: 77583 - DNA, 40 bp, Homo sapiens
atattttagaggttgtggtaaaatttaacatgcaaaattg

SEQ ID NO: 77584 - DNA, 40 bp, Homo sapiens
aattttgcatgttaaattttaccacaacctctaaaatatt

SEQ ID NO: 77585 - DNA, 40 bp, Homo sapiens
aatattttagaggttgtggtaaaatttaacatgcaaaatt

SEQ ID NO: 77586 - DNA, 40 bp, Homo sapiens
attttgcatgttaaattttaccacaacctctaaaatattg

SEQ ID NO: 77587 - DNA, 40 bp, Homo sapiens
caatattttagaggttgtggtaaaatttaacatgcaaaat

SEQ ID NO: 77588 - DNA, 40 bp, Homo sapiens
ttttgcatgttaaattttaccacaacctctaaaatattgc

SEQ ID NO: 77589 - DNA, 40 bp, Homo sapiens
gcaatattttagaggttgtggtaaaatttaacatgcaaaa

SEQ ID NO: 77590 - DNA, 40 bp, Homo sapiens
tttgcatgttaaattttaccacaacctctaaaatattgca

SEQ ID NO: 77591 - DNA, 40 bp, Homo sapiens
tgcaatattttagaggttgtggtaaaatttaacatgcaaa

SEQ ID NO: 77592 - DNA, 40 bp, Homo sapiens
ttgcatgttaaattttaccacaacctctaaaatattgcaa

SEQ ID NO: 77593 - DNA, 40 bp, Homo sapiens
ttgcaatattttagaggttgtggtaaaatttaacatgcaa

SEQ ID NO: 77594 - DNA, 40 bp, Homo sapiens
tgcatgttaaattttaccacaacctctaaaatattgcaaa

SEQ ID NO: 77595 - DNA, 40 bp, Homo sapiens
tttgcaatattttagaggttgtggtaaaatttaacatgca

SEQ ID NO: 77596 - DNA, 40 bp, Homo sapiens
gcatgttaaattttaccacaacctctaaaatattgcaaat

SEQ ID NO: 77597 - DNA, 40 bp, Homo sapiens
atttgcaatattttagaggttgtggtaaaatttaacatgc

SEQ ID NO: 77598 - DNA, 40 bp, Homo sapiens
catgttaaattttaccacaacctctaaaatattgcaaatt

SEQ ID NO: 77599 - DNA, 40 bp, Homo sapiens
aatttgcaatattttagaggttgtggtaaaatttaacatg

SEQ ID NO: 77600 - DNA, 40 bp, Homo sapiens
atgttaaattttaccacaacctctaaaatattgcaaattt

SEQ ID NO: 77601 - DNA, 40 bp, Homo sapiens
aaatttgcaatattttagaggttgtggtaaaatttaacat

SEQ ID NO: 77602 - DNA, 40 bp, Homo sapiens
tgttaaattttaccacaacctctaaaatattgcaaattta

SEQ ID NO: 77603 - DNA, 40 bp, Homo sapiens
taaatttgcaatattttagaggttgtggtaaaatttaaca

SEQ ID NO: 77604 - DNA, 40 bp, Homo sapiens
gttaaattttaccacaacctctaaaatattgcaaatttaa

SEQ ID NO: 77605 - DNA, 40 bp, Homo sapiens
ttaaatttgcaatattttagaggttgtggtaaaatttaac

SEQ ID NO: 77606 - DNA, 40 bp, Homo sapiens
ttaaattttaccacaacctctaaaatattgcaaatttaac

SEQ ID NO: 77607 - DNA, 40 bp, Homo sapiens
gttaaatttgcaatattttagaggttgtggtaaaatttaa

SEQ ID NO: 77608 - DNA, 40 bp, Homo sapiens
taaattttaccacaacctctaaaatattgcaaatttaaca

SEQ ID NO: 77609 - DNA, 40 bp, Homo sapiens
tgttaaatttgcaatattttagaggttgtggtaaaattta

SEQ ID NO: 77610 - DNA, 40 bp, Homo sapiens
aaattttaccacaacctctaaaatattgcaaatttaacaa

SEQ ID NO: 77611 - DNA, 40 bp, Homo sapiens
ttgttaaatttgcaatattttagaggttgtggtaaaattt

SEQ ID NO: 77612 - DNA, 40 bp, Homo sapiens
aattttaccacaacctctaaaatattgcaaatttaacaat

SEQ ID NO: 77613 - DNA, 40 bp, Homo sapiens
attgttaaatttgcaatattttagaggttgtggtaaaatt

SEQ ID NO: 77614 - DNA, 40 bp, Homo sapiens
attttaccacaacctctaaaatattgcaaatttaacaata

SEQ ID NO: 77615 - DNA, 40 bp, Homo sapiens
tattgttaaatttgcaatattttagaggttgtggtaaaat

SEQ ID NO: 77616 - DNA, 40 bp, Homo sapiens
ttttaccacaacctctaaaatattgcaaatttaacaatac

SEQ ID NO: 77617 - DNA, 40 bp, Homo sapiens
gtattgttaaatttgcaatattttagaggttgtggtaaaa

SEQ ID NO: 77618 - DNA, 40 bp, Homo sapiens
tttaccacaacctctaaaatattgcaaatttaacaataca

SEQ ID NO: 77619 - DNA, 40 bp, Homo sapiens
tgtattgttaaatttgcaatattttagaggttgtggtaaa

SEQ ID NO: 77620 - DNA, 40 bp, Homo sapiens
ttaccacaacctctaaaatattgcaaatttaacaatacag

SEQ ID NO: 77621 - DNA, 40 bp, Homo sapiens
ctgtattgttaaatttgcaatattttagaggttgtggtaa

SEQ ID NO: 77622 - DNA, 40 bp, Homo sapiens
taccacaacctctaaaatattgcaaatttaacaatacagt

SEQ ID NO: 77623 - DNA, 40 bp, Homo sapiens
actgtattgttaaatttgcaatattttagaggttgtggta

SEQ ID NO: 77624 - DNA, 40 bp, Homo sapiens
accacaacctctaaaatattgcaaatttaacaatacagtt

SEQ ID NO: 77625 - DNA, 40 bp, Homo sapiens
aactgtattgttaaatttgcaatattttagaggttgtggt

SEQ ID NO: 77626 - DNA, 40 bp, Homo sapiens
ccacaacctctaaaatattgcaaatttaacaatacagttt

SEQ ID NO: 77627 - DNA, 40 bp, Homo sapiens
aaactgtattgttaaatttgcaatattttagaggttgtgg

SEQ ID NO: 77628 - DNA, 40 bp, Homo sapiens
cacaacctctaaaatattgcaaatttaacaatacagtttg

SEQ ID NO: 77629 - DNA, 40 bp, Homo sapiens
caaactgtattgttaaatttgcaatattttagaggttgtg

SEQ ID NO: 77630 - DNA, 40 bp, Homo sapiens
acaacctctaaaatattgcaaatttaacaatacagtttga

SEQ ID NO: 77631 - DNA, 40 bp, Homo sapiens
tcaaactgtattgttaaatttgcaatattttagaggttgt

SEQ ID NO: 77632 - DNA, 40 bp, Homo sapiens
caacctctaaaatattgcaaatttaacaatacagtttgaa

SEQ ID NO: 77633 - DNA, 40 bp, Homo sapiens
ttcaaactgtattgttaaatttgcaatattttagaggttg

SEQ ID NO: 77634 - DNA, 40 bp, Homo sapiens
aacctctaaaatattgcaaatttaacaatacagtttgaaa

SEQ ID NO: 77635 - DNA, 40 bp, Homo sapiens
tttcaaactgtattgttaaatttgcaatattttagaggtt

SEQ ID NO: 77636 - DNA, 40 bp, Homo sapiens
acctctaaaatattgcaaatttaacaatacagtttgaaaa

SEQ ID NO: 77637 - DNA, 40 bp, Homo sapiens
ttttcaaactgtattgttaaatttgcaatattttagaggt

SEQ ID NO: 77638 - DNA, 40 bp, Homo sapiens
cctctaaaatattgcaaatttaacaatacagtttgaaaag

SEQ ID NO: 77639 - DNA, 40 bp, Homo sapiens
cttttcaaactgtattgttaaatttgcaatattttagagg

SEQ ID NO: 77640 - DNA, 40 bp, Homo sapiens
ctctaaaatattgcaaatttaacaatacagtttgaaaagt

SEQ ID NO: 77641 - DNA, 40 bp, Homo sapiens
acttttcaaactgtattgttaaatttgcaatattttagag

SEQ ID NO: 77642 - DNA, 40 bp, Homo sapiens
tctaaaatattgcaaatttaacaatacagtttgaaaagtt

SEQ ID NO: 77643 - DNA, 40 bp, Homo sapiens
aacttttcaaactgtattgttaaatttgcaatattttaga

SEQ ID NO: 77644 - DNA, 40 bp, Homo sapiens
ctaaaatattgcaaatttaacaatacagtttgaaaagtta

SEQ ID NO: 77645 - DNA, 40 bp, Homo sapiens
taacttttcaaactgtattgttaaatttgcaatattttag

SEQ ID NO: 77646 - DNA, 40 bp, Homo sapiens
taaaatattgcaaatttaacaatacagtttgaaaagttac

SEQ ID NO: 77647 - DNA, 40 bp, Homo sapiens
gtaacttttcaaactgtattgttaaatttgcaatatttta

SEQ ID NO: 77648 - DNA, 40 bp, Homo sapiens
aaaatattgcaaatttaacaatacagtttgaaaagttaca

SEQ ID NO: 77649 - DNA, 40 bp, Homo sapiens
tgtaacttttcaaactgtattgttaaatttgcaatatttt

SEQ ID NO: 77650 - DNA, 40 bp, Homo sapiens
aaatattgcaaatttaacaatacagtttgaaaagttacac

SEQ ID NO: 77651 - DNA, 40 bp, Homo sapiens
gtgtaacttttcaaactgtattgttaaatttgcaatattt

SEQ ID NO: 77652 - DNA, 40 bp, Homo sapiens
aatattgcaaatttaacaatacagtttgaaaagttacaca

SEQ ID NO: 77653 - DNA, 40 bp, Homo sapiens
tgtgtaacttttcaaactgtattgttaaatttgcaatatt

SEQ ID NO: 77654 - DNA, 40 bp, Homo sapiens
atattgcaaatttaacaatacagtttgaaaagttacacat

SEQ ID NO: 77655 - DNA, 40 bp, Homo sapiens
atgtgtaacttttcaaactgtattgttaaatttgcaatat

SEQ ID NO: 77656 - DNA, 40 bp, Homo sapiens
tattgcaaatttaacaatacagtttgaaaagttacacatt

SEQ ID NO: 77657 - DNA, 40 bp, Homo sapiens
aatgtgtaacttttcaaactgtattgttaaatttgcaata

SEQ ID NO: 77658 - DNA, 40 bp, Homo sapiens
attgcaaatttaacaatacagtttgaaaagttacacattt

SEQ ID NO: 77659 - DNA, 40 bp, Homo sapiens
aaatgtgtaacttttcaaactgtattgttaaatttgcaat

SEQ ID NO: 77660 - DNA, 40 bp, Homo sapiens
ttgcaaatttaacaatacagtttgaaaagttacacatttt

SEQ ID NO: 77661 - DNA, 40 bp, Homo sapiens
aaaatgtgtaacttttcaaactgtattgttaaatttgcaa

SEQ ID NO: 77662 - DNA, 40 bp, Homo sapiens
tgcaaatttaacaatacagtttgaaaagttacacatttta

SEQ ID NO: 77663 - DNA, 40 bp, Homo sapiens
taaaatgtgtaacttttcaaactgtattgttaaatttgca

SEQ ID NO: 77664 - DNA, 40 bp, Homo sapiens
gcaaatttaacaatacagtttgaaaagttacacattttaa

SEQ ID NO: 77665 - DNA, 40 bp, Homo sapiens
ttaaaatgtgtaacttttcaaactgtattgttaaatttgc

SEQ ID NO: 77666 - DNA, 40 bp, Homo sapiens
caaatttaacaatacagtttgaaaagttacacattttaaa

SEQ ID NO: 77667 - DNA, 40 bp, Homo sapiens
tttaaaatgtgtaacttttcaaactgtattgttaaatttg

SEQ ID NO: 77668 - DNA, 40 bp, Homo sapiens
aaatttaacaatacagtttgaaaagttacacattttaaat

SEQ ID NO: 77669 - DNA, 40 bp, Homo sapiens
atttaaaatgtgtaacttttcaaactgtattgttaaattt

SEQ ID NO: 77670 - DNA, 40 bp, Homo sapiens
aatttaacaatacagtttgaaaagttacacattttaaata

SEQ ID NO: 77671 - DNA, 40 bp, Homo sapiens
tatttaaaatgtgtaacttttcaaactgtattgttaaatt

SEQ ID NO: 77672 - DNA, 40 bp, Homo sapiens
atttaacaatacagtttgaaaagttacacattttaaataa

SEQ ID NO: 77673 - DNA, 40 bp, Homo sapiens
ttatttaaaatgtgtaacttttcaaactgtattgttaaat

SEQ ID NO: 77674 - DNA, 40 bp, Homo sapiens
tttaacaatacagtttgaaaagttacacattttaaataac

SEQ ID NO: 77675 - DNA, 40 bp, Homo sapiens
gttatttaaaatgtgtaacttttcaaactgtattgttaaa

SEQ ID NO: 77676 - DNA, 40 bp, Homo sapiens
ttaacaatacagtttgaaaagttacacattttaaataaca

SEQ ID NO: 77677 - DNA, 40 bp, Homo sapiens
tgttatttaaaatgtgtaacttttcaaactgtattgttaa

SEQ ID NO: 77678 - DNA, 40 bp, Homo sapiens
taacaatacagtttgaaaagttacacattttaaataacag

SEQ ID NO: 77679 - DNA, 40 bp, Homo sapiens
ctgttatttaaaatgtgtaacttttcaaactgtattgtta

SEQ ID NO: 77680 - DNA, 40 bp, Homo sapiens
aacaatacagtttgaaaagttacacattttaaataacagt

SEQ ID NO: 77681 - DNA, 40 bp, Homo sapiens
actgttatttaaaatgtgtaacttttcaaactgtattgtt

SEQ ID NO: 77682 - DNA, 40 bp, Homo sapiens
acaatacagtttgaaaagttacacattttaaataacagta

SEQ ID NO: 77683 - DNA, 40 bp, Homo sapiens
tactgttatttaaaatgtgtaacttttcaaactgtattgt

SEQ ID NO: 77684 - DNA, 40 bp, Homo sapiens
caatacagtttgaaaagttacacattttaaataacagtac

SEQ ID NO: 77685 - DNA, 40 bp, Homo sapiens
gtactgttatttaaaatgtgtaacttttcaaactgtattg

SEQ ID NO: 77686 - DNA, 40 bp, Homo sapiens
aatacagtttgaaaagttacacattttaaataacagtacc

SEQ ID NO: 77687 - DNA, 40 bp, Homo sapiens
ggtactgttatttaaaatgtgtaacttttcaaactgtatt

SEQ ID NO: 77688 - DNA, 40 bp, Homo sapiens
atacagtttgaaaagttacacattttaaataacagtacca

SEQ ID NO: 77689 - DNA, 40 bp, Homo sapiens
tggtactgttatttaaaatgtgtaacttttcaaactgtat

SEQ ID NO: 77690 - DNA, 40 bp, Homo sapiens
tacagtttgaaaagttacacattttaaataacagtaccat

SEQ ID NO: 77691 - DNA, 40 bp, Homo sapiens
atggtactgttatttaaaatgtgtaacttttcaaactgta

SEQ ID NO: 77692 - DNA, 40 bp, Homo sapiens
acagtttgaaaagttacacattttaaataacagtaccatg

SEQ ID NO: 77693 - DNA, 40 bp, Homo sapiens
catggtactgttatttaaaatgtgtaacttttcaaactgt

SEQ ID NO: 77694 - DNA, 40 bp, Homo sapiens
cagtttgaaaagttacacattttaaataacagtaccatga

SEQ ID NO: 77695 - DNA, 40 bp, Homo sapiens
tcatggtactgttatttaaaatgtgtaacttttcaaactg

SEQ ID NO: 77696 - DNA, 40 bp, Homo sapiens
agtttgaaaagttacacattttaaataacagtaccatgac

SEQ ID NO: 77697 - DNA, 40 bp, Homo sapiens
gtcatggtactgttatttaaaatgtgtaacttttcaaact

SEQ ID NO: 77698 - DNA, 40 bp, Homo sapiens
gtttgaaaagttacacattttaaataacagtaccatgacc

SEQ ID NO: 77699 - DNA, 40 bp, Homo sapiens
ggtcatggtactgttatttaaaatgtgtaacttttcaaac

SEQ ID NO: 77700 - DNA, 40 bp, Homo sapiens
tttgaaaagttacacattttaaataacagtaccatgacca

SEQ ID NO: 77701 - DNA, 40 bp, Homo sapiens
tggtcatggtactgttatttaaaatgtgtaacttttcaaa

SEQ ID NO: 77702 - DNA, 40 bp, Homo sapiens
ttgaaaagttacacattttaaataacagtaccatgaccag

SEQ ID NO: 77703 - DNA, 40 bp, Homo sapiens
ctggtcatggtactgttatttaaaatgtgtaacttttcaa

SEQ ID NO: 77704 - DNA, 40 bp, Homo sapiens
tgaaaagttacacattttaaataacagtaccatgaccaga

SEQ ID NO: 77705 - DNA, 40 bp, Homo sapiens
tctggtcatggtactgttatttaaaatgtgtaacttttca

SEQ ID NO: 77706 - DNA, 40 bp, Homo sapiens
gaaaagttacacattttaaataacagtaccatgaccagat

SEQ ID NO: 77707 - DNA, 40 bp, Homo sapiens
atctggtcatggtactgttatttaaaatgtgtaacttttc

SEQ ID NO: 77708 - DNA, 40 bp, Homo sapiens
aaaagttacacattttaaataacagtaccatgaccagatt

SEQ ID NO: 77709 - DNA, 40 bp, Homo sapiens
aatctggtcatggtactgttatttaaaatgtgtaactttt

SEQ ID NO: 77710 - DNA, 40 bp, Homo sapiens
aaagttacacattttaaataacagtaccatgaccagattt

SEQ ID NO: 77711 - DNA, 40 bp, Homo sapiens
aaatctggtcatggtactgttatttaaaatgtgtaacttt

SEQ ID NO: 77712 - DNA, 40 bp, Homo sapiens
aagttacacattttaaataacagtaccatgaccagattta

SEQ ID NO: 77713 - DNA, 40 bp, Homo sapiens
taaatctggtcatggtactgttatttaaaatgtgtaactt

SEQ ID NO: 77714 - DNA, 40 bp, Homo sapiens
agttacacattttaaataacagtaccatgaccagatttag

SEQ ID NO: 77715 - DNA, 40 bp, Homo sapiens
ctaaatctggtcatggtactgttatttaaaatgtgtaact

SEQ ID NO: 77716 - DNA, 40 bp, Homo sapiens
gttacacattttaaataacagtaccatgaccagatttagg

SEQ ID NO: 77717 - DNA, 40 bp, Homo sapiens
cctaaatctggtcatggtactgttatttaaaatgtgtaac

SEQ ID NO: 77718 - DNA, 40 bp, Homo sapiens
ttacacattttaaataacagtaccatgaccagatttaggt

SEQ ID NO: 77719 - DNA, 40 bp, Homo sapiens
acctaaatctggtcatggtactgttatttaaaatgtgtaa

SEQ ID NO: 77720 - DNA, 40 bp, Homo sapiens
tacacattttaaataacagtaccatgaccagatttaggtg

SEQ ID NO: 77721 - DNA, 40 bp, Homo sapiens
cacctaaatctggtcatggtactgttatttaaaatgtgta

SEQ ID NO: 77722 - DNA, 40 bp, Homo sapiens
acacattttaaataacagtaccatgaccagatttaggtgg

SEQ ID NO: 77723 - DNA, 40 bp, Homo sapiens
ccacctaaatctggtcatggtactgttatttaaaatgtgt

SEQ ID NO: 77724 - DNA, 40 bp, Homo sapiens
cacattttaaataacagtaccatgaccagatttaggtggt

SEQ ID NO: 77725 - DNA, 40 bp, Homo sapiens
accacctaaatctggtcatggtactgttatttaaaatgtg

SEQ ID NO: 77726 - DNA, 40 bp, Homo sapiens
acattttaaataacagtaccatgaccagatttaggtggtg

SEQ ID NO: 77727 - DNA, 40 bp, Homo sapiens
caccacctaaatctggtcatggtactgttatttaaaatgt

SEQ ID NO: 77728 - DNA, 40 bp, Homo sapiens
cattttaaataacagtaccatgaccagatttaggtggtgg

SEQ ID NO: 77729 - DNA, 40 bp, Homo sapiens
ccaccacctaaatctggtcatggtactgttatttaaaatg

SEQ ID NO: 77730 - DNA, 40 bp, Homo sapiens
attttaaataacagtaccatgaccagatttaggtggtggt

SEQ ID NO: 77731 - DNA, 40 bp, Homo sapiens
accaccacctaaatctggtcatggtactgttatttaaaat

SEQ ID NO: 77732 - DNA, 40 bp, Homo sapiens
ttttaaataacagtaccatgaccagatttaggtggtggtt

SEQ ID NO: 77733 - DNA, 40 bp, Homo sapiens
aaccaccacctaaatctggtcatggtactgttatttaaaa

SEQ ID NO: 77734 - DNA, 40 bp, Homo sapiens
tttaaataacagtaccatgaccagatttaggtggtggttt

SEQ ID NO: 77735 - DNA, 40 bp, Homo sapiens
aaaccaccacctaaatctggtcatggtactgttatttaaa

SEQ ID NO: 77736 - DNA, 40 bp, Homo sapiens
ttaaataacagtaccatgaccagatttaggtggtggtttt

SEQ ID NO: 77737 - DNA, 40 bp, Homo sapiens
aaaaccaccacctaaatctggtcatggtactgttatttaa

SEQ ID NO: 77738 - DNA, 40 bp, Homo sapiens
taaataacagtaccatgaccagatttaggtggtggtttta

SEQ ID NO: 77739 - DNA, 40 bp, Homo sapiens
taaaaccaccacctaaatctggtcatggtactgttattta

SEQ ID NO: 77740 - DNA, 40 bp, Homo sapiens
aaataacagtaccatgaccagatttaggtggtggttttaa

SEQ ID NO: 77741 - DNA, 40 bp, Homo sapiens
ttaaaaccaccacctaaatctggtcatggtactgttattt

SEQ ID NO: 77742 - DNA, 40 bp, Homo sapiens
aataacagtaccatgaccagatttaggtggtggttttaat

SEQ ID NO: 77743 - DNA, 40 bp, Homo sapiens
attaaaaccaccacctaaatctggtcatggtactgttatt

SEQ ID NO: 77744 - DNA, 40 bp, Homo sapiens
ataacagtaccatgaccagatttaggtggtggttttaatt

SEQ ID NO: 77745 - DNA, 40 bp, Homo sapiens
aattaaaaccaccacctaaatctggtcatggtactgttat

SEQ ID NO: 77746 - DNA, 40 bp, Homo sapiens
taacagtaccatgaccagatttaggtggtggttttaattt

SEQ ID NO: 77747 - DNA, 40 bp, Homo sapiens
aaattaaaaccaccacctaaatctggtcatggtactgtta

SEQ ID NO: 77748 - DNA, 40 bp, Homo sapiens
aacagtaccatgaccagatttaggtggtggttttaatttt

SEQ ID NO: 77749 - DNA, 40 bp, Homo sapiens
aaaattaaaaccaccacctaaatctggtcatggtactgtt

SEQ ID NO: 77750 - DNA, 40 bp, Homo sapiens
acagtaccatgaccagatttaggtggtggttttaattttt

SEQ ID NO: 77751 - DNA, 40 bp, Homo sapiens
aaaaattaaaaccaccacctaaatctggtcatggtactgt

SEQ ID NO: 77752 - DNA, 40 bp, Homo sapiens
cagtaccatgaccagatttaggtggtggttttaatttttt

SEQ ID NO: 77753 - DNA, 40 bp, Homo sapiens
aaaaaattaaaaccaccacctaaatctggtcatggtactg

SEQ ID NO: 77754 - DNA, 40 bp, Homo sapiens
agtaccatgaccagatttaggtggtggttttaatttttta

SEQ ID NO: 77755 - DNA, 40 bp, Homo sapiens
taaaaaattaaaaccaccacctaaatctggtcatggtact

SEQ ID NO: 77756 - DNA, 40 bp, Homo sapiens
gtaccatgaccagatttaggtggtggttttaattttttat

SEQ ID NO: 77757 - DNA, 40 bp, Homo sapiens
ataaaaaattaaaaccaccacctaaatctggtcatggtac

SEQ ID NO: 77758 - DNA, 40 bp, Homo sapiens
taccatgaccagatttaggtggtggttttaattttttatt

SEQ ID NO: 77759 - DNA, 40 bp, Homo sapiens
aataaaaaattaaaaccaccacctaaatctggtcatggta

SEQ ID NO: 77760 - DNA, 40 bp, Homo sapiens
accatgaccagatttaggtggtggttttaattttttattt

SEQ ID NO: 77761 - DNA, 40 bp, Homo sapiens
aaataaaaaattaaaaccaccacctaaatctggtcatggt

SEQ ID NO: 77762 - DNA, 40 bp, Homo sapiens
ccatgaccagatttaggtggtggttttaattttttatttt

SEQ ID NO: 77763 - DNA, 40 bp, Homo sapiens
aaaataaaaaattaaaaccaccacctaaatctggtcatgg

SEQ ID NO: 77764 - DNA, 40 bp, Homo sapiens
catgaccagatttaggtggtggttttaattttttattttc

SEQ ID NO: 77765 - DNA, 40 bp, Homo sapiens
gaaaataaaaaattaaaaccaccacctaaatctggtcatg

SEQ ID NO: 77766 - DNA, 40 bp, Homo sapiens
atgaccagatttaggtggtggttttaattttttattttct

SEQ ID NO: 77767 - DNA, 40 bp, Homo sapiens
agaaaataaaaaattaaaaccaccacctaaatctggtcat

SEQ ID NO: 77768 - DNA, 40 bp, Homo sapiens
tgaccagatttaggtggtggttttaattttttattttctc

SEQ ID NO: 77769 - DNA, 40 bp, Homo sapiens
gagaaaataaaaaattaaaaccaccacctaaatctggtca

SEQ ID NO: 77770 - DNA, 40 bp, Homo sapiens
gaccagatttaggtggtggttttaattttttattttctcc

SEQ ID NO: 77771 - DNA, 40 bp, Homo sapiens
ggagaaaataaaaaattaaaaccaccacctaaatctggtc

SEQ ID NO: 77772 - DNA, 40 bp, Homo sapiens
accagatttaggtggtggttttaattttttattttctcct

SEQ ID NO: 77773 - DNA, 40 bp, Homo sapiens
aggagaaaataaaaaattaaaaccaccacctaaatctggt

SEQ ID NO: 77774 - DNA, 40 bp, Homo sapiens
ccagatttaggtggtggttttaattttttattttctcctc

SEQ ID NO: 77775 - DNA, 40 bp, Homo sapiens
gaggagaaaataaaaaattaaaaccaccacctaaatctgg

SEQ ID NO: 77776 - DNA, 40 bp, Homo sapiens
cagatttaggtggtggttttaattttttattttctcctcc

SEQ ID NO: 77777 - DNA, 40 bp, Homo sapiens
ggaggagaaaataaaaaattaaaaccaccacctaaatctg

SEQ ID NO: 77778 - DNA, 40 bp, Homo sapiens
agatttaggtggtggttttaattttttattttctcctcct

SEQ ID NO: 77779 - DNA, 40 bp, Homo sapiens
aggaggagaaaataaaaaattaaaaccaccacctaaatct

SEQ ID NO: 77780 - DNA, 40 bp, Homo sapiens
gatttaggtggtggttttaattttttattttctcctccta

SEQ ID NO: 77781 - DNA, 40 bp, Homo sapiens
taggaggagaaaataaaaaattaaaaccaccacctaaatc

SEQ ID NO: 77782 - DNA, 40 bp, Homo sapiens
atttaggtggtggttttaattttttattttctcctcctat

SEQ ID NO: 77783 - DNA, 40 bp, Homo sapiens
ataggaggagaaaataaaaaattaaaaccaccacctaaat

SEQ ID NO: 77784 - DNA, 40 bp, Homo sapiens
tttaggtggtggttttaattttttattttctcctcctatt

SEQ ID NO: 77785 - DNA, 40 bp, Homo sapiens
aataggaggagaaaataaaaaattaaaaccaccacctaaa

SEQ ID NO: 77786 - DNA, 40 bp, Homo sapiens
ttaggtggtggttttaattttttattttctcctcctattg

SEQ ID NO: 77787 - DNA, 40 bp, Homo sapiens
caataggaggagaaaataaaaaattaaaaccaccacctaa

SEQ ID NO: 77788 - DNA, 40 bp, Homo sapiens
taggtggtggttttaattttttattttctcctcctattgt

SEQ ID NO: 77789 - DNA, 40 bp, Homo sapiens
acaataggaggagaaaataaaaaattaaaaccaccaccta

SEQ ID NO: 77790 - DNA, 40 bp, Homo sapiens
aggtggtggttttaattttttattttctcctcctattgtc

SEQ ID NO: 77791 - DNA, 40 bp, Homo sapiens
gacaataggaggagaaaataaaaaattaaaaccaccacct

SEQ ID NO: 77792 - DNA, 40 bp, Homo sapiens
ggtggtggttttaattttttattttctcctcctattgtct

SEQ ID NO: 77793 - DNA, 40 bp, Homo sapiens
agacaataggaggagaaaataaaaaattaaaaccaccacc

SEQ ID NO: 77794 - DNA, 40 bp, Homo sapiens
gtggtggttttaattttttattttctcctcctattgtctc

SEQ ID NO: 77795 - DNA, 40 bp, Homo sapiens
gagacaataggaggagaaaataaaaaattaaaaccaccac

SEQ ID NO: 77796 - DNA, 40 bp, Homo sapiens
tggtggttttaattttttattttctcctcctattgtctca

SEQ ID NO: 77797 - DNA, 40 bp, Homo sapiens
tgagacaataggaggagaaaataaaaaattaaaaccacca

SEQ ID NO: 77798 - DNA, 40 bp, Homo sapiens
ggtggttttaattttttattttctcctcctattgtctcac

SEQ ID NO: 77799 - DNA, 40 bp, Homo sapiens
gtgagacaataggaggagaaaataaaaaattaaaaccacc

SEQ ID NO: 77800 - DNA, 40 bp, Homo sapiens
gtggttttaattttttattttctcctcctattgtctcacc

SEQ ID NO: 77801 - DNA, 40 bp, Homo sapiens
ggtgagacaataggaggagaaaataaaaaattaaaaccac

SEQ ID NO: 77802 - DNA, 40 bp, Homo sapiens
tggttttaattttttattttctcctcctattgtctcacca

SEQ ID NO: 77803 - DNA, 40 bp, Homo sapiens
tggtgagacaataggaggagaaaataaaaaattaaaacca

SEQ ID NO: 77804 - DNA, 40 bp, Homo sapiens
ggttttaattttttattttctcctcctattgtctcaccat

SEQ ID NO: 77805 - DNA, 40 bp, Homo sapiens
atggtgagacaataggaggagaaaataaaaaattaaaacc

SEQ ID NO: 77806 - DNA, 40 bp, Homo sapiens
gttttaattttttattttctcctcctattgtctcaccatt

SEQ ID NO: 77807 - DNA, 40 bp, Homo sapiens
aatggtgagacaataggaggagaaaataaaaaattaaaac

SEQ ID NO: 77808 - DNA, 40 bp, Homo sapiens
ttttaattttttattttctcctcctattgtctcaccatta

SEQ ID NO: 77809 - DNA, 40 bp, Homo sapiens
taatggtgagacaataggaggagaaaataaaaaattaaaa

SEQ ID NO: 77810 - DNA, 40 bp, Homo sapiens
tttaattttttattttctcctcctattgtctcaccattag

SEQ ID NO: 77811 - DNA, 40 bp, Homo sapiens
ctaatggtgagacaataggaggagaaaataaaaaattaaa

SEQ ID NO: 77812 - DNA, 40 bp, Homo sapiens
ttaattttttattttctcctcctattgtctcaccattaga

SEQ ID NO: 77813 - DNA, 40 bp, Homo sapiens
tctaatggtgagacaataggaggagaaaataaaaaattaa

SEQ ID NO: 77814 - DNA, 40 bp, Homo sapiens
taattttttattttctcctcctattgtctcaccattagat

SEQ ID NO: 77815 - DNA, 40 bp, Homo sapiens
atctaatggtgagacaataggaggagaaaataaaaaatta

SEQ ID NO: 77816 - DNA, 40 bp, Homo sapiens
aattttttattttctcctcctattgtctcaccattagatg

SEQ ID NO: 77817 - DNA, 40 bp, Homo sapiens
catctaatggtgagacaataggaggagaaaataaaaaatt

SEQ ID NO: 77818 - DNA, 40 bp, Homo sapiens
attttttattttctcctcctattgtctcaccattagatga

SEQ ID NO: 77819 - DNA, 40 bp, Homo sapiens
tcatctaatggtgagacaataggaggagaaaataaaaaat

SEQ ID NO: 77820 - DNA, 40 bp, Homo sapiens
ttttttattttctcctcctattgtctcaccattagatgat

SEQ ID NO: 77821 - DNA, 40 bp, Homo sapiens
atcatctaatggtgagacaataggaggagaaaataaaaaa

SEQ ID NO: 77822 - DNA, 40 bp, Homo sapiens
tttttattttctcctcctattgtctcaccattagatgatt

SEQ ID NO: 77823 - DNA, 40 bp, Homo sapiens
aatcatctaatggtgagacaataggaggagaaaataaaaa

SEQ ID NO: 77824 - DNA, 40 bp, Homo sapiens
ttttattttctcctcctattgtctcaccattagatgattt

SEQ ID NO: 77825 - DNA, 40 bp, Homo sapiens
aaatcatctaatggtgagacaataggaggagaaaataaaa

SEQ ID NO: 77826 - DNA, 40 bp, Homo sapiens
tttattttctcctcctattgtctcaccattagatgatttt

SEQ ID NO: 77827 - DNA, 40 bp, Homo sapiens
aaaatcatctaatggtgagacaataggaggagaaaataaa

SEQ ID NO: 77828 - DNA, 40 bp, Homo sapiens
ttattttctcctcctattgtctcaccattagatgatttta

SEQ ID NO: 77829 - DNA, 40 bp, Homo sapiens
taaaatcatctaatggtgagacaataggaggagaaaataa

SEQ ID NO: 77830 - DNA, 40 bp, Homo sapiens
tattttctcctcctattgtctcaccattagatgattttaa

SEQ ID NO: 77831 - DNA, 40 bp, Homo sapiens
ttaaaatcatctaatggtgagacaataggaggagaaaata

SEQ ID NO: 77832 - DNA, 40 bp, Homo sapiens
attttctcctcctattgtctcaccattagatgattttaaa

SEQ ID NO: 77833 - DNA, 40 bp, Homo sapiens
tttaaaatcatctaatggtgagacaataggaggagaaaat

SEQ ID NO: 77834 - DNA, 40 bp, Homo sapiens
ttttctcctcctattgtctcaccattagatgattttaaaa

SEQ ID NO: 77835 - DNA, 40 bp, Homo sapiens
ttttaaaatcatctaatggtgagacaataggaggagaaaa

SEQ ID NO: 77836 - DNA, 40 bp, Homo sapiens
tttctcctcctattgtctcaccattagatgattttaaaaa

SEQ ID NO: 77837 - DNA, 40 bp, Homo sapiens
tttttaaaatcatctaatggtgagacaataggaggagaaa

SEQ ID NO: 77838 - DNA, 40 bp, Homo sapiens
ttctcctcctattgtctcaccattagatgattttaaaaat

SEQ ID NO: 77839 - DNA, 40 bp, Homo sapiens
atttttaaaatcatctaatggtgagacaataggaggagaa

SEQ ID NO: 77840 - DNA, 40 bp, Homo sapiens
tctcctcctattgtctcaccattagatgattttaaaaata

SEQ ID NO: 77841 - DNA, 40 bp, Homo sapiens
tatttttaaaatcatctaatggtgagacaataggaggaga

SEQ ID NO: 77842 - DNA, 40 bp, Homo sapiens
ctcctcctattgtctcaccattagatgattttaaaaatag

SEQ ID NO: 77843 - DNA, 40 bp, Homo sapiens
ctatttttaaaatcatctaatggtgagacaataggaggag

SEQ ID NO: 77844 - DNA, 40 bp, Homo sapiens
tcctcctattgtctcaccattagatgattttaaaaataga

SEQ ID NO: 77845 - DNA, 40 bp, Homo sapiens
tctatttttaaaatcatctaatggtgagacaataggagga

SEQ ID NO: 77846 - DNA, 40 bp, Homo sapiens
cctcctattgtctcaccattagatgattttaaaaatagaa

SEQ ID NO: 77847 - DNA, 40 bp, Homo sapiens
ttctatttttaaaatcatctaatggtgagacaataggagg

SEQ ID NO: 77848 - DNA, 40 bp, Homo sapiens
ctcctattgtctcaccattagatgattttaaaaatagaat

SEQ ID NO: 77849 - DNA, 40 bp, Homo sapiens
attctatttttaaaatcatctaatggtgagacaataggag

SEQ ID NO: 77850 - DNA, 40 bp, Homo sapiens
tcctattgtctcaccattagatgattttaaaaatagaatt

SEQ ID NO: 77851 - DNA, 40 bp, Homo sapiens
aattctatttttaaaatcatctaatggtgagacaatagga

SEQ ID NO: 77852 - DNA, 40 bp, Homo sapiens
cctattgtctcaccattagatgattttaaaaatagaattg

SEQ ID NO: 77853 - DNA, 40 bp, Homo sapiens
caattctatttttaaaatcatctaatggtgagacaatagg

SEQ ID NO: 77854 - DNA, 40 bp, Homo sapiens
ctattgtctcaccattagatgattttaaaaatagaattgt

SEQ ID NO: 77855 - DNA, 40 bp, Homo sapiens
acaattctatttttaaaatcatctaatggtgagacaatag

SEQ ID NO: 77856 - DNA, 40 bp, Homo sapiens
tattgtctcaccattagatgattttaaaaatagaattgtt

SEQ ID NO: 77857 - DNA, 40 bp, Homo sapiens
aacaattctatttttaaaatcatctaatggtgagacaata

SEQ ID NO: 77858 - DNA, 40 bp, Homo sapiens
attgtctcaccattagatgattttaaaaatagaattgttt

SEQ ID NO: 77859 - DNA, 40 bp, Homo sapiens
aaacaattctatttttaaaatcatctaatggtgagacaat

SEQ ID NO: 77860 - DNA, 40 bp, Homo sapiens
ttgtctcaccattagatgattttaaaaatagaattgttta

SEQ ID NO: 77861 - DNA, 40 bp, Homo sapiens
taaacaattctatttttaaaatcatctaatggtgagacaa

SEQ ID NO: 77862 - DNA, 40 bp, Homo sapiens
tgtctcaccattagatgattttaaaaatagaattgtttag

SEQ ID NO: 77863 - DNA, 40 bp, Homo sapiens
ctaaacaattctatttttaaaatcatctaatggtgagaca

SEQ ID NO: 77864 - DNA, 40 bp, Homo sapiens
gtctcaccattagatgattttaaaaatagaattgtttaga

SEQ ID NO: 77865 - DNA, 40 bp, Homo sapiens
tctaaacaattctatttttaaaatcatctaatggtgagac

SEQ ID NO: 77866 - DNA, 40 bp, Homo sapiens
tctcaccattagatgattttaaaaatagaattgtttagag

SEQ ID NO: 77867 - DNA, 40 bp, Homo sapiens
ctctaaacaattctatttttaaaatcatctaatggtgaga

SEQ ID NO: 77868 - DNA, 40 bp, Homo sapiens
ctcaccattagatgattttaaaaatagaattgtttagagt

SEQ ID NO: 77869 - DNA, 40 bp, Homo sapiens
actctaaacaattctatttttaaaatcatctaatggtgag

SEQ ID NO: 77870 - DNA, 40 bp, Homo sapiens
tcaccattagatgattttaaaaatagaattgtttagagta

SEQ ID NO: 77871 - DNA, 40 bp, Homo sapiens
tactctaaacaattctatttttaaaatcatctaatggtga

SEQ ID NO: 77872 - DNA, 40 bp, Homo sapiens
caccattagatgattttaaaaatagaattgtttagagtaa

SEQ ID NO: 77873 - DNA, 40 bp, Homo sapiens
ttactctaaacaattctatttttaaaatcatctaatggtg

SEQ ID NO: 77874 - DNA, 40 bp, Homo sapiens
accattagatgattttaaaaatagaattgtttagagtaaa

SEQ ID NO: 77875 - DNA, 40 bp, Homo sapiens
tttactctaaacaattctatttttaaaatcatctaatggt

SEQ ID NO: 77876 - DNA, 40 bp, Homo sapiens
ccattagatgattttaaaaatagaattgtttagagtaaaa

SEQ ID NO: 77877 - DNA, 40 bp, Homo sapiens
ttttactctaaacaattctatttttaaaatcatctaatgg

SEQ ID NO: 77878 - DNA, 40 bp, Homo sapiens
cattagatgattttaaaaatagaattgtttagagtaaaat

SEQ ID NO: 77879 - DNA, 40 bp, Homo sapiens
attttactctaaacaattctatttttaaaatcatctaatg

SEQ ID NO: 77880 - DNA, 40 bp, Homo sapiens
attagatgattttaaaaatagaattgtttagagtaaaata

SEQ ID NO: 77881 - DNA, 40 bp, Homo sapiens
tattttactctaaacaattctatttttaaaatcatctaat

SEQ ID NO: 77882 - DNA, 40 bp, Homo sapiens
ttagatgattttaaaaatagaattgtttagagtaaaataa

SEQ ID NO: 77883 - DNA, 40 bp, Homo sapiens
ttattttactctaaacaattctatttttaaaatcatctaa

SEQ ID NO: 77884 - DNA, 40 bp, Homo sapiens
tagatgattttaaaaatagaattgtttagagtaaaataag

SEQ ID NO: 77885 - DNA, 40 bp, Homo sapiens
cttattttactctaaacaattctatttttaaaatcatcta

SEQ ID NO: 77886 - DNA, 40 bp, Homo sapiens
agatgattttaaaaatagaattgtttagagtaaaataagt

SEQ ID NO: 77887 - DNA, 40 bp, Homo sapiens
acttattttactctaaacaattctatttttaaaatcatct

SEQ ID NO: 77888 - DNA, 40 bp, Homo sapiens
gatgattttaaaaatagaattgtttagagtaaaataagtg

SEQ ID NO: 77889 - DNA, 40 bp, Homo sapiens
cacttattttactctaaacaattctatttttaaaatcatc

SEQ ID NO: 77890 - DNA, 40 bp, Homo sapiens
atgattttaaaaatagaattgtttagagtaaaataagtgt

SEQ ID NO: 77891 - DNA, 40 bp, Homo sapiens
acacttattttactctaaacaattctatttttaaaatcat

SEQ ID NO: 77892 - DNA, 40 bp, Homo sapiens
tgattttaaaaatagaattgtttagagtaaaataagtgtt

SEQ ID NO: 77893 - DNA, 40 bp, Homo sapiens
aacacttattttactctaaacaattctatttttaaaatca

SEQ ID NO: 77894 - DNA, 40 bp, Homo sapiens
gattttaaaaatagaattgtttagagtaaaataagtgtta

SEQ ID NO: 77895 - DNA, 40 bp, Homo sapiens
taacacttattttactctaaacaattctatttttaaaatc

SEQ ID NO: 77896 - DNA, 40 bp, Homo sapiens
attttaaaaatagaattgtttagagtaaaataagtgttat

SEQ ID NO: 77897 - DNA, 40 bp, Homo sapiens
ataacacttattttactctaaacaattctatttttaaaat

SEQ ID NO: 77898 - DNA, 40 bp, Homo sapiens
ttttaaaaatagaattgtttagagtaaaataagtgttatg

SEQ ID NO: 77899 - DNA, 40 bp, Homo sapiens
cataacacttattttactctaaacaattctatttttaaaa

SEQ ID NO: 77900 - DNA, 40 bp, Homo sapiens
tttaaaaatagaattgtttagagtaaaataagtgttatgc

SEQ ID NO: 77901 - DNA, 40 bp, Homo sapiens
gcataacacttattttactctaaacaattctatttttaaa

SEQ ID NO: 77902 - DNA, 40 bp, Homo sapiens
ttaaaaatagaattgtttagagtaaaataagtgttatgct

SEQ ID NO: 77903 - DNA, 40 bp, Homo sapiens
agcataacacttattttactctaaacaattctatttttaa

SEQ ID NO: 77904 - DNA, 40 bp, Homo sapiens
taaaaatagaattgtttagagtaaaataagtgttatgctc

SEQ ID NO: 77905 - DNA, 40 bp, Homo sapiens
gagcataacacttattttactctaaacaattctattttta

SEQ ID NO: 77906 - DNA, 40 bp, Homo sapiens
aaaaatagaattgtttagagtaaaataagtgttatgctct

SEQ ID NO: 77907 - DNA, 40 bp, Homo sapiens
agagcataacacttattttactctaaacaattctattttt

SEQ ID NO: 77908 - DNA, 40 bp, Homo sapiens
aaaatagaattgtttagagtaaaataagtgttatgctcta

SEQ ID NO: 77909 - DNA, 40 bp, Homo sapiens
tagagcataacacttattttactctaaacaattctatttt

SEQ ID NO: 77910 - DNA, 40 bp, Homo sapiens
aaatagaattgtttagagtaaaataagtgttatgctctaa

SEQ ID NO: 77911 - DNA, 40 bp, Homo sapiens
ttagagcataacacttattttactctaaacaattctattt

SEQ ID NO: 77912 - DNA, 40 bp, Homo sapiens
aatagaattgtttagagtaaaataagtgttatgctctaat

SEQ ID NO: 77913 - DNA, 40 bp, Homo sapiens
attagagcataacacttattttactctaaacaattctatt

SEQ ID NO: 77914 - DNA, 40 bp, Homo sapiens
atagaattgtttagagtaaaataagtgttatgctctaatt

SEQ ID NO: 77915 - DNA, 40 bp, Homo sapiens
aattagagcataacacttattttactctaaacaattctat

SEQ ID NO: 77916 - DNA, 40 bp, Homo sapiens
tagaattgtttagagtaaaataagtgttatgctctaattt

SEQ ID NO: 77917 - DNA, 40 bp, Homo sapiens
aaattagagcataacacttattttactctaaacaattcta

SEQ ID NO: 77918 - DNA, 40 bp, Homo sapiens
agaattgtttagagtaaaataagtgttatgctctaattta

SEQ ID NO: 77919 - DNA, 40 bp, Homo sapiens
taaattagagcataacacttattttactctaaacaattct

SEQ ID NO: 77920 - DNA, 40 bp, Homo sapiens
gaattgtttagagtaaaataagtgttatgctctaatttat

SEQ ID NO: 77921 - DNA, 40 bp, Homo sapiens
ataaattagagcataacacttattttactctaaacaattc

SEQ ID NO: 77922 - DNA, 40 bp, Homo sapiens
aattgtttagagtaaaataagtgttatgctctaatttata

SEQ ID NO: 77923 - DNA, 40 bp, Homo sapiens
tataaattagagcataacacttattttactctaaacaatt

SEQ ID NO: 77924 - DNA, 40 bp, Homo sapiens
attgtttagagtaaaataagtgttatgctctaatttatat

SEQ ID NO: 77925 - DNA, 40 bp, Homo sapiens
atataaattagagcataacacttattttactctaaacaat

SEQ ID NO: 77926 - DNA, 40 bp, Homo sapiens
ttgtttagagtaaaataagtgttatgctctaatttatatt

SEQ ID NO: 77927 - DNA, 40 bp, Homo sapiens
aatataaattagagcataacacttattttactctaaacaa

SEQ ID NO: 77928 - DNA, 40 bp, Homo sapiens
tgtttagagtaaaataagtgttatgctctaatttatattt

SEQ ID NO: 77929 - DNA, 40 bp, Homo sapiens
aaatataaattagagcataacacttattttactctaaaca

SEQ ID NO: 77930 - DNA, 40 bp, Homo sapiens
gtttagagtaaaataagtgttatgctctaatttatattta

SEQ ID NO: 77931 - DNA, 40 bp, Homo sapiens
taaatataaattagagcataacacttattttactctaaac

SEQ ID NO: 77932 - DNA, 40 bp, Homo sapiens
tttagagtaaaataagtgttatgctctaatttatatttaa

SEQ ID NO: 77933 - DNA, 40 bp, Homo sapiens
ttaaatataaattagagcataacacttattttactctaaa

SEQ ID NO: 77934 - DNA, 40 bp, Homo sapiens
ttagagtaaaataagtgttatgctctaatttatatttaaa

SEQ ID NO: 77935 - DNA, 40 bp, Homo sapiens
tttaaatataaattagagcataacacttattttactctaa

SEQ ID NO: 77936 - DNA, 40 bp, Homo sapiens
tagagtaaaataagtgttatgctctaatttatatttaaaa

SEQ ID NO: 77937 - DNA, 40 bp, Homo sapiens
ttttaaatataaattagagcataacacttattttactcta

SEQ ID NO: 77938 - DNA, 40 bp, Homo sapiens
agagtaaaataagtgttatgctctaatttatatttaaaat

SEQ ID NO: 77939 - DNA, 40 bp, Homo sapiens
attttaaatataaattagagcataacacttattttactct

SEQ ID NO: 77940 - DNA, 40 bp, Homo sapiens
gagtaaaataagtgttatgctctaatttatatttaaaatg

SEQ ID NO: 77941 - DNA, 40 bp, Homo sapiens
cattttaaatataaattagagcataacacttattttactc

SEQ ID NO: 77942 - DNA, 40 bp, Homo sapiens
agtaaaataagtgttatgctctaatttatatttaaaatga

SEQ ID NO: 77943 - DNA, 40 bp, Homo sapiens
tcattttaaatataaattagagcataacacttattttact

SEQ ID NO: 77944 - DNA, 40 bp, Homo sapiens
gtaaaataagtgttatgctctaatttatatttaaaatgaa

SEQ ID NO: 77945 - DNA, 40 bp, Homo sapiens
ttcattttaaatataaattagagcataacacttattttac

SEQ ID NO: 77946 - DNA, 40 bp, Homo sapiens
taaaataagtgttatgctctaatttatatttaaaatgaag

SEQ ID NO: 77947 - DNA, 40 bp, Homo sapiens
cttcattttaaatataaattagagcataacacttatttta

SEQ ID NO: 77948 - DNA, 40 bp, Homo sapiens
aaaataagtgttatgctctaatttatatttaaaatgaagg

SEQ ID NO: 77949 - DNA, 40 bp, Homo sapiens
ccttcattttaaatataaattagagcataacacttatttt

SEQ ID NO: 77950 - DNA, 40 bp, Homo sapiens
aaataagtgttatgctctaatttatatttaaaatgaaggt

SEQ ID NO: 77951 - DNA, 40 bp, Homo sapiens
accttcattttaaatataaattagagcataacacttattt

SEQ ID NO: 77952 - DNA, 40 bp, Homo sapiens
aataagtgttatgctctaatttatatttaaaatgaaggtt

SEQ ID NO: 77953 - DNA, 40 bp, Homo sapiens
aaccttcattttaaatataaattagagcataacacttatt

SEQ ID NO: 77954 - DNA, 40 bp, Homo sapiens
ataagtgttatgctctaatttatatttaaaatgaaggttt

SEQ ID NO: 77955 - DNA, 40 bp, Homo sapiens
aaaccttcattttaaatataaattagagcataacacttat

SEQ ID NO: 77956 - DNA, 40 bp, Homo sapiens
taagtgttatgctctaatttatatttaaaatgaaggttta

SEQ ID NO: 77957 - DNA, 40 bp, Homo sapiens
taaaccttcattttaaatataaattagagcataacactta

SEQ ID NO: 77958 - DNA, 40 bp, Homo sapiens
aagtgttatgctctaatttatatttaaaatgaaggtttaa

SEQ ID NO: 77959 - DNA, 40 bp, Homo sapiens
ttaaaccttcattttaaatataaattagagcataacactt

SEQ ID NO: 77960 - DNA, 40 bp, Homo sapiens
agtgttatgctctaatttatatttaaaatgaaggtttaag

SEQ ID NO: 77961 - DNA, 40 bp, Homo sapiens
cttaaaccttcattttaaatataaattagagcataacact

SEQ ID NO: 77962 - DNA, 40 bp, Homo sapiens
gtgttatgctctaatttatatttaaaatgaaggtttaagc

SEQ ID NO: 77963 - DNA, 40 bp, Homo sapiens
gcttaaaccttcattttaaatataaattagagcataacac

SEQ ID NO: 77964 - DNA, 40 bp, Homo sapiens
tgttatgctctaatttatatttaaaatgaaggtttaagca

SEQ ID NO: 77965 - DNA, 40 bp, Homo sapiens
tgcttaaaccttcattttaaatataaattagagcataaca

SEQ ID NO: 77966 - DNA, 40 bp, Homo sapiens
gttatgctctaatttatatttaaaatgaaggtttaagcac

SEQ ID NO: 77967 - DNA, 40 bp, Homo sapiens
gtgcttaaaccttcattttaaatataaattagagcataac

SEQ ID NO: 77968 - DNA, 40 bp, Homo sapiens
ttatgctctaatttatatttaaaatgaaggtttaagcacg

SEQ ID NO: 77969 - DNA, 40 bp, Homo sapiens
cgtgcttaaaccttcattttaaatataaattagagcataa

SEQ ID NO: 77970 - DNA, 40 bp, Homo sapiens
tatgctctaatttatatttaaaatgaaggtttaagcacgt

SEQ ID NO: 77971 - DNA, 40 bp, Homo sapiens
acgtgcttaaaccttcattttaaatataaattagagcata

SEQ ID NO: 77972 - DNA, 40 bp, Homo sapiens
atgctctaatttatatttaaaatgaaggtttaagcacgta

SEQ ID NO: 77973 - DNA, 40 bp, Homo sapiens
tacgtgcttaaaccttcattttaaatataaattagagcat

SEQ ID NO: 77974 - DNA, 40 bp, Homo sapiens
tgctctaatttatatttaaaatgaaggtttaagcacgtac

SEQ ID NO: 77975 - DNA, 40 bp, Homo sapiens
gtacgtgcttaaaccttcattttaaatataaattagagca

SEQ ID NO: 77976 - DNA, 40 bp, Homo sapiens
gctctaatttatatttaaaatgaaggtttaagcacgtact

SEQ ID NO: 77977 - DNA, 40 bp, Homo sapiens
agtacgtgcttaaaccttcattttaaatataaattagagc

SEQ ID NO: 77978 - DNA, 40 bp, Homo sapiens
ctctaatttatatttaaaatgaaggtttaagcacgtacta

SEQ ID NO: 77979 - DNA, 40 bp, Homo sapiens
tagtacgtgcttaaaccttcattttaaatataaattagag

SEQ ID NO: 77980 - DNA, 40 bp, Homo sapiens
tctaatttatatttaaaatgaaggtttaagcacgtactat

SEQ ID NO: 77981 - DNA, 40 bp, Homo sapiens
atagtacgtgcttaaaccttcattttaaatataaattaga

SEQ ID NO: 77982 - DNA, 40 bp, Homo sapiens
ctaatttatatttaaaatgaaggtttaagcacgtactatt

SEQ ID NO: 77983 - DNA, 40 bp, Homo sapiens
aatagtacgtgcttaaaccttcattttaaatataaattag

SEQ ID NO: 77984 - DNA, 40 bp, Homo sapiens
taatttatatttaaaatgaaggtttaagcacgtactattc

SEQ ID NO: 77985 - DNA, 40 bp, Homo sapiens
gaatagtacgtgcttaaaccttcattttaaatataaatta

SEQ ID NO: 77986 - DNA, 40 bp, Homo sapiens
aatttatatttaaaatgaaggtttaagcacgtactattct

SEQ ID NO: 77987 - DNA, 40 bp, Homo sapiens
agaatagtacgtgcttaaaccttcattttaaatataaatt

SEQ ID NO: 77988 - DNA, 40 bp, Homo sapiens
atttatatttaaaatgaaggtttaagcacgtactattcta

SEQ ID NO: 77989 - DNA, 40 bp, Homo sapiens
tagaatagtacgtgcttaaaccttcattttaaatataaat

SEQ ID NO: 77990 - DNA, 40 bp, Homo sapiens
tttatatttaaaatgaaggtttaagcacgtactattctaa

SEQ ID NO: 77991 - DNA, 40 bp, Homo sapiens
ttagaatagtacgtgcttaaaccttcattttaaatataaa

SEQ ID NO: 77992 - DNA, 40 bp, Homo sapiens
ttatatttaaaatgaaggtttaagcacgtactattctaaa

SEQ ID NO: 77993 - DNA, 40 bp, Homo sapiens
tttagaatagtacgtgcttaaaccttcattttaaatataa

SEQ ID NO: 77994 - DNA, 40 bp, Homo sapiens
tatatttaaaatgaaggtttaagcacgtactattctaaaa

SEQ ID NO: 77995 - DNA, 40 bp, Homo sapiens
ttttagaatagtacgtgcttaaaccttcattttaaatata

SEQ ID NO: 77996 - DNA, 40 bp, Homo sapiens
atatttaaaatgaaggtttaagcacgtactattctaaaat

SEQ ID NO: 77997 - DNA, 40 bp, Homo sapiens
attttagaatagtacgtgcttaaaccttcattttaaatat

SEQ ID NO: 77998 - DNA, 40 bp, Homo sapiens
tatttaaaatgaaggtttaagcacgtactattctaaaatt

SEQ ID NO: 77999 - DNA, 40 bp, Homo sapiens
aattttagaatagtacgtgcttaaaccttcattttaaata

SEQ ID NO: 78000 - DNA, 40 bp, Homo sapiens
atttaaaatgaaggtttaagcacgtactattctaaaattt

SEQ ID NO: 78001 - DNA, 40 bp, Homo sapiens
aaattttagaatagtacgtgcttaaaccttcattttaaat

SEQ ID NO: 78002 - DNA, 40 bp, Homo sapiens
tttaaaatgaaggtttaagcacgtactattctaaaatttc

SEQ ID NO: 78003 - DNA, 40 bp, Homo sapiens
gaaattttagaatagtacgtgcttaaaccttcattttaaa

SEQ ID NO: 78004 - DNA, 40 bp, Homo sapiens
ttaaaatgaaggtttaagcacgtactattctaaaatttct

SEQ ID NO: 78005 - DNA, 40 bp, Homo sapiens
agaaattttagaatagtacgtgcttaaaccttcattttaa

SEQ ID NO: 78006 - DNA, 40 bp, Homo sapiens
taaaatgaaggtttaagcacgtactattctaaaatttcta

SEQ ID NO: 78007 - DNA, 40 bp, Homo sapiens
tagaaattttagaatagtacgtgcttaaaccttcatttta

SEQ ID NO: 78008 - DNA, 40 bp, Homo sapiens
aaaatgaaggtttaagcacgtactattctaaaatttctaa

SEQ ID NO: 78009 - DNA, 40 bp, Homo sapiens
ttagaaattttagaatagtacgtgcttaaaccttcatttt

SEQ ID NO: 78010 - DNA, 40 bp, Homo sapiens
aaatgaaggtttaagcacgtactattctaaaatttctaat

SEQ ID NO: 78011 - DNA, 40 bp, Homo sapiens
attagaaattttagaatagtacgtgcttaaaccttcattt

SEQ ID NO: 78012 - DNA, 40 bp, Homo sapiens
aatgaaggtttaagcacgtactattctaaaatttctaatt

SEQ ID NO: 78013 - DNA, 40 bp, Homo sapiens
aattagaaattttagaatagtacgtgcttaaaccttcatt

SEQ ID NO: 78014 - DNA, 40 bp, Homo sapiens
atgaaggtttaagcacgtactattctaaaatttctaattt

SEQ ID NO: 78015 - DNA, 40 bp, Homo sapiens
aaattagaaattttagaatagtacgtgcttaaaccttcat

SEQ ID NO: 78016 - DNA, 40 bp, Homo sapiens
tgaaggtttaagcacgtactattctaaaatttctaatttg

SEQ ID NO: 78017 - DNA, 40 bp, Homo sapiens
caaattagaaattttagaatagtacgtgcttaaaccttca

SEQ ID NO: 78018 - DNA, 40 bp, Homo sapiens
gaaggtttaagcacgtactattctaaaatttctaatttgt

SEQ ID NO: 78019 - DNA, 40 bp, Homo sapiens
acaaattagaaattttagaatagtacgtgcttaaaccttc

SEQ ID NO: 78020 - DNA, 40 bp, Homo sapiens
aaggtttaagcacgtactattctaaaatttctaatttgtg

SEQ ID NO: 78021 - DNA, 40 bp, Homo sapiens
cacaaattagaaattttagaatagtacgtgcttaaacctt

SEQ ID NO: 78022 - DNA, 40 bp, Homo sapiens
aggtttaagcacgtactattctaaaatttctaatttgtgc

SEQ ID NO: 78023 - DNA, 40 bp, Homo sapiens
gcacaaattagaaattttagaatagtacgtgcttaaacct

SEQ ID NO: 78024 - DNA, 40 bp, Homo sapiens
ggtttaagcacgtactattctaaaatttctaatttgtgca

SEQ ID NO: 78025 - DNA, 40 bp, Homo sapiens
tgcacaaattagaaattttagaatagtacgtgcttaaacc

SEQ ID NO: 78026 - DNA, 40 bp, Homo sapiens
gtttaagcacgtactattctaaaatttctaatttgtgcaa

SEQ ID NO: 78027 - DNA, 40 bp, Homo sapiens
ttgcacaaattagaaattttagaatagtacgtgcttaaac

SEQ ID NO: 78028 - DNA, 40 bp, Homo sapiens
tttaagcacgtactattctaaaatttctaatttgtgcaaa

SEQ ID NO: 78029 - DNA, 40 bp, Homo sapiens
tttgcacaaattagaaattttagaatagtacgtgcttaaa

SEQ ID NO: 78030 - DNA, 40 bp, Homo sapiens
ttaagcacgtactattctaaaatttctaatttgtgcaaat

SEQ ID NO: 78031 - DNA, 40 bp, Homo sapiens
atttgcacaaattagaaattttagaatagtacgtgcttaa

SEQ ID NO: 78032 - DNA, 40 bp, Homo sapiens
taagcacgtactattctaaaatttctaatttgtgcaaatt

SEQ ID NO: 78033 - DNA, 40 bp, Homo sapiens
aatttgcacaaattagaaattttagaatagtacgtgctta

SEQ ID NO: 78034 - DNA, 40 bp, Homo sapiens
aagcacgtactattctaaaatttctaatttgtgcaaatta

SEQ ID NO: 78035 - DNA, 40 bp, Homo sapiens
taatttgcacaaattagaaattttagaatagtacgtgctt

SEQ ID NO: 78036 - DNA, 40 bp, Homo sapiens
agcacgtactattctaaaatttctaatttgtgcaaattat

SEQ ID NO: 78037 - DNA, 40 bp, Homo sapiens
ataatttgcacaaattagaaattttagaatagtacgtgct

SEQ ID NO: 78038 - DNA, 40 bp, Homo sapiens
gcacgtactattctaaaatttctaatttgtgcaaattatg

SEQ ID NO: 78039 - DNA, 40 bp, Homo sapiens
cataatttgcacaaattagaaattttagaatagtacgtgc

SEQ ID NO: 78040 - DNA, 40 bp, Homo sapiens
cacgtactattctaaaatttctaatttgtgcaaattatgt

SEQ ID NO: 78041 - DNA, 40 bp, Homo sapiens
acataatttgcacaaattagaaattttagaatagtacgtg

SEQ ID NO: 78042 - DNA, 40 bp, Homo sapiens
acgtactattctaaaatttctaatttgtgcaaattatgtt

SEQ ID NO: 78043 - DNA, 40 bp, Homo sapiens
aacataatttgcacaaattagaaattttagaatagtacgt

SEQ ID NO: 78044 - DNA, 40 bp, Homo sapiens
cgtactattctaaaatttctaatttgtgcaaattatgttt

SEQ ID NO: 78045 - DNA, 40 bp, Homo sapiens
aaacataatttgcacaaattagaaattttagaatagtacg

SEQ ID NO: 78046 - DNA, 40 bp, Homo sapiens
gtactattctaaaatttctaatttgtgcaaattatgtttt

SEQ ID NO: 78047 - DNA, 40 bp, Homo sapiens
aaaacataatttgcacaaattagaaattttagaatagtac

SEQ ID NO: 78048 - DNA, 40 bp, Homo sapiens
tactattctaaaatttctaatttgtgcaaattatgtttta

SEQ ID NO: 78049 - DNA, 40 bp, Homo sapiens
taaaacataatttgcacaaattagaaattttagaatagta

SEQ ID NO: 78050 - DNA, 40 bp, Homo sapiens
actattctaaaatttctaatttgtgcaaattatgttttat

SEQ ID NO: 78051 - DNA, 40 bp, Homo sapiens
ataaaacataatttgcacaaattagaaattttagaatagt

SEQ ID NO: 78052 - DNA, 40 bp, Homo sapiens
ctattctaaaatttctaatttgtgcaaattatgttttata

SEQ ID NO: 78053 - DNA, 40 bp, Homo sapiens
tataaaacataatttgcacaaattagaaattttagaatag

SEQ ID NO: 78054 - DNA, 40 bp, Homo sapiens
tattctaaaatttctaatttgtgcaaattatgttttatac

SEQ ID NO: 78055 - DNA, 40 bp, Homo sapiens
gtataaaacataatttgcacaaattagaaattttagaata

SEQ ID NO: 78056 - DNA, 40 bp, Homo sapiens
attctaaaatttctaatttgtgcaaattatgttttataca

SEQ ID NO: 78057 - DNA, 40 bp, Homo sapiens
tgtataaaacataatttgcacaaattagaaattttagaat

SEQ ID NO: 78058 - DNA, 40 bp, Homo sapiens
ttctaaaatttctaatttgtgcaaattatgttttatacag

SEQ ID NO: 78059 - DNA, 40 bp, Homo sapiens
ctgtataaaacataatttgcacaaattagaaattttagaa

SEQ ID NO: 78060 - DNA, 40 bp, Homo sapiens
tctaaaatttctaatttgtgcaaattatgttttatacagt

SEQ ID NO: 78061 - DNA, 40 bp, Homo sapiens
actgtataaaacataatttgcacaaattagaaattttaga

SEQ ID NO: 78062 - DNA, 40 bp, Homo sapiens
ctaaaatttctaatttgtgcaaattatgttttatacagtg

SEQ ID NO: 78063 - DNA, 40 bp, Homo sapiens
cactgtataaaacataatttgcacaaattagaaattttag

SEQ ID NO: 78064 - DNA, 40 bp, Homo sapiens
taaaatttctaatttgtgcaaattatgttttatacagtga

SEQ ID NO: 78065 - DNA, 40 bp, Homo sapiens
tcactgtataaaacataatttgcacaaattagaaatttta

SEQ ID NO: 78066 - DNA, 40 bp, Homo sapiens
aaaatttctaatttgtgcaaattatgttttatacagtgac

SEQ ID NO: 78067 - DNA, 40 bp, Homo sapiens
gtcactgtataaaacataatttgcacaaattagaaatttt

SEQ ID NO: 78068 - DNA, 40 bp, Homo sapiens
aaatttctaatttgtgcaaattatgttttatacagtgact

SEQ ID NO: 78069 - DNA, 40 bp, Homo sapiens
agtcactgtataaaacataatttgcacaaattagaaattt

SEQ ID NO: 78070 - DNA, 40 bp, Homo sapiens
aatttctaatttgtgcaaattatgttttatacagtgactg

SEQ ID NO: 78071 - DNA, 40 bp, Homo sapiens
cagtcactgtataaaacataatttgcacaaattagaaatt

SEQ ID NO: 78072 - DNA, 40 bp, Homo sapiens
atttctaatttgtgcaaattatgttttatacagtgactgt

SEQ ID NO: 78073 - DNA, 40 bp, Homo sapiens
acagtcactgtataaaacataatttgcacaaattagaaat

SEQ ID NO: 78074 - DNA, 40 bp, Homo sapiens
tttctaatttgtgcaaattatgttttatacagtgactgta

SEQ ID NO: 78075 - DNA, 40 bp, Homo sapiens
tacagtcactgtataaaacataatttgcacaaattagaaa

SEQ ID NO: 78076 - DNA, 40 bp, Homo sapiens
ttctaatttgtgcaaattatgttttatacagtgactgtag

SEQ ID NO: 78077 - DNA, 40 bp, Homo sapiens
ctacagtcactgtataaaacataatttgcacaaattagaa

SEQ ID NO: 78078 - DNA, 40 bp, Homo sapiens
tctaatttgtgcaaattatgttttatacagtgactgtagg

SEQ ID NO: 78079 - DNA, 40 bp, Homo sapiens
cctacagtcactgtataaaacataatttgcacaaattaga

SEQ ID NO: 78080 - DNA, 40 bp, Homo sapiens
ctaatttgtgcaaattatgttttatacagtgactgtaggt

SEQ ID NO: 78081 - DNA, 40 bp, Homo sapiens
acctacagtcactgtataaaacataatttgcacaaattag

SEQ ID NO: 78082 - DNA, 40 bp, Homo sapiens
taatttgtgcaaattatgttttatacagtgactgtaggtg

SEQ ID NO: 78083 - DNA, 40 bp, Homo sapiens
cacctacagtcactgtataaaacataatttgcacaaatta

SEQ ID NO: 78084 - DNA, 40 bp, Homo sapiens
aatttgtgcaaattatgttttatacagtgactgtaggtga

SEQ ID NO: 78085 - DNA, 40 bp, Homo sapiens
tcacctacagtcactgtataaaacataatttgcacaaatt

SEQ ID NO: 78086 - DNA, 40 bp, Homo sapiens
atttgtgcaaattatgttttatacagtgactgtaggtgaa

SEQ ID NO: 78087 - DNA, 40 bp, Homo sapiens
ttcacctacagtcactgtataaaacataatttgcacaaat

SEQ ID NO: 78088 - DNA, 40 bp, Homo sapiens
tttgtgcaaattatgttttatacagtgactgtaggtgaat

SEQ ID NO: 78089 - DNA, 40 bp, Homo sapiens
attcacctacagtcactgtataaaacataatttgcacaaa

SEQ ID NO: 78090 - DNA, 40 bp, Homo sapiens
ttgtgcaaattatgttttatacagtgactgtaggtgaatg

SEQ ID NO: 78091 - DNA, 40 bp, Homo sapiens
cattcacctacagtcactgtataaaacataatttgcacaa

SEQ ID NO: 78092 - DNA, 40 bp, Homo sapiens
tgtgcaaattatgttttatacagtgactgtaggtgaatgt

SEQ ID NO: 78093 - DNA, 40 bp, Homo sapiens
acattcacctacagtcactgtataaaacataatttgcaca

SEQ ID NO: 78094 - DNA, 40 bp, Homo sapiens
gtgcaaattatgttttatacagtgactgtaggtgaatgtc

SEQ ID NO: 78095 - DNA, 40 bp, Homo sapiens
gacattcacctacagtcactgtataaaacataatttgcac

SEQ ID NO: 78096 - DNA, 40 bp, Homo sapiens
tgcaaattatgttttatacagtgactgtaggtgaatgtca

SEQ ID NO: 78097 - DNA, 40 bp, Homo sapiens
tgacattcacctacagtcactgtataaaacataatttgca

SEQ ID NO: 78098 - DNA, 40 bp, Homo sapiens
gcaaattatgttttatacagtgactgtaggtgaatgtcac

SEQ ID NO: 78099 - DNA, 40 bp, Homo sapiens
gtgacattcacctacagtcactgtataaaacataatttgc

SEQ ID NO: 78100 - DNA, 40 bp, Homo sapiens
caaattatgttttatacagtgactgtaggtgaatgtcaca

SEQ ID NO: 78101 - DNA, 40 bp, Homo sapiens
tgtgacattcacctacagtcactgtataaaacataatttg

SEQ ID NO: 78102 - DNA, 40 bp, Homo sapiens
aaattatgttttatacagtgactgtaggtgaatgtcacaa

SEQ ID NO: 78103 - DNA, 40 bp, Homo sapiens
ttgtgacattcacctacagtcactgtataaaacataattt

SEQ ID NO: 78104 - DNA, 40 bp, Homo sapiens
aattatgttttatacagtgactgtaggtgaatgtcacaat

SEQ ID NO: 78105 - DNA, 40 bp, Homo sapiens
attgtgacattcacctacagtcactgtataaaacataatt

SEQ ID NO: 78106 - DNA, 40 bp, Homo sapiens
attatgttttatacagtgactgtaggtgaatgtcacaatt

SEQ ID NO: 78107 - DNA, 40 bp, Homo sapiens
aattgtgacattcacctacagtcactgtataaaacataat

SEQ ID NO: 78108 - DNA, 40 bp, Homo sapiens
ttatgttttatacagtgactgtaggtgaatgtcacaattg

SEQ ID NO: 78109 - DNA, 40 bp, Homo sapiens
caattgtgacattcacctacagtcactgtataaaacataa

SEQ ID NO: 78110 - DNA, 40 bp, Homo sapiens
tatgttttatacagtgactgtaggtgaatgtcacaattgt

SEQ ID NO: 78111 - DNA, 40 bp, Homo sapiens
acaattgtgacattcacctacagtcactgtataaaacata

SEQ ID NO: 78112 - DNA, 40 bp, Homo sapiens
atgttttatacagtgactgtaggtgaatgtcacaattgtt

SEQ ID NO: 78113 - DNA, 40 bp, Homo sapiens
aacaattgtgacattcacctacagtcactgtataaaacat

SEQ ID NO: 78114 - DNA, 40 bp, Homo sapiens
tgttttatacagtgactgtaggtgaatgtcacaattgttt

SEQ ID NO: 78115 - DNA, 40 bp, Homo sapiens
aaacaattgtgacattcacctacagtcactgtataaaaca

SEQ ID NO: 78116 - DNA, 40 bp, Homo sapiens
gttttatacagtgactgtaggtgaatgtcacaattgtttg

SEQ ID NO: 78117 - DNA, 40 bp, Homo sapiens
caaacaattgtgacattcacctacagtcactgtataaaac

SEQ ID NO: 78118 - DNA, 40 bp, Homo sapiens
ttttatacagtgactgtaggtgaatgtcacaattgtttga

SEQ ID NO: 78119 - DNA, 40 bp, Homo sapiens
tcaaacaattgtgacattcacctacagtcactgtataaaa

SEQ ID NO: 78120 - DNA, 40 bp, Homo sapiens
tttatacagtgactgtaggtgaatgtcacaattgtttgat

SEQ ID NO: 78121 - DNA, 40 bp, Homo sapiens
atcaaacaattgtgacattcacctacagtcactgtataaa

SEQ ID NO: 78122 - DNA, 40 bp, Homo sapiens
ttatacagtgactgtaggtgaatgtcacaattgtttgatg

SEQ ID NO: 78123 - DNA, 40 bp, Homo sapiens
catcaaacaattgtgacattcacctacagtcactgtataa

SEQ ID NO: 78124 - DNA, 40 bp, Homo sapiens
tatacagtgactgtaggtgaatgtcacaattgtttgatgt

SEQ ID NO: 78125 - DNA, 40 bp, Homo sapiens
acatcaaacaattgtgacattcacctacagtcactgtata

SEQ ID NO: 78126 - DNA, 40 bp, Homo sapiens
atacagtgactgtaggtgaatgtcacaattgtttgatgtg

SEQ ID NO: 78127 - DNA, 40 bp, Homo sapiens
cacatcaaacaattgtgacattcacctacagtcactgtat

SEQ ID NO: 78128 - DNA, 40 bp, Homo sapiens
tacagtgactgtaggtgaatgtcacaattgtttgatgtga

SEQ ID NO: 78129 - DNA, 40 bp, Homo sapiens
tcacatcaaacaattgtgacattcacctacagtcactgta

SEQ ID NO: 78130 - DNA, 40 bp, Homo sapiens
acagtgactgtaggtgaatgtcacaattgtttgatgtgac

SEQ ID NO: 78131 - DNA, 40 bp, Homo sapiens
gtcacatcaaacaattgtgacattcacctacagtcactgt

SEQ ID NO: 78132 - DNA, 40 bp, Homo sapiens
cagtgactgtaggtgaatgtcacaattgtttgatgtgacg

SEQ ID NO: 78133 - DNA, 40 bp, Homo sapiens
cgtcacatcaaacaattgtgacattcacctacagtcactg

SEQ ID NO: 78134 - DNA, 40 bp, Homo sapiens
agtgactgtaggtgaatgtcacaattgtttgatgtgacga

SEQ ID NO: 78135 - DNA, 40 bp, Homo sapiens
tcgtcacatcaaacaattgtgacattcacctacagtcact

SEQ ID NO: 78136 - DNA, 40 bp, Homo sapiens
gtgactgtaggtgaatgtcacaattgtttgatgtgacgaa

SEQ ID NO: 78137 - DNA, 40 bp, Homo sapiens
ttcgtcacatcaaacaattgtgacattcacctacagtcac

SEQ ID NO: 78138 - DNA, 40 bp, Homo sapiens
tgactgtaggtgaatgtcacaattgtttgatgtgacgaat

SEQ ID NO: 78139 - DNA, 40 bp, Homo sapiens
attcgtcacatcaaacaattgtgacattcacctacagtca

SEQ ID NO: 78140 - DNA, 40 bp, Homo sapiens
gactgtaggtgaatgtcacaattgtttgatgtgacgaatc

SEQ ID NO: 78141 - DNA, 40 bp, Homo sapiens
gattcgtcacatcaaacaattgtgacattcacctacagtc

SEQ ID NO: 78142 - DNA, 40 bp, Homo sapiens
actgtaggtgaatgtcacaattgtttgatgtgacgaatcc

SEQ ID NO: 78143 - DNA, 40 bp, Homo sapiens
ggattcgtcacatcaaacaattgtgacattcacctacagt

SEQ ID NO: 78144 - DNA, 40 bp, Homo sapiens
ctgtaggtgaatgtcacaattgtttgatgtgacgaatcct

SEQ ID NO: 78145 - DNA, 40 bp, Homo sapiens
aggattcgtcacatcaaacaattgtgacattcacctacag

SEQ ID NO: 78146 - DNA, 40 bp, Homo sapiens
tgtaggtgaatgtcacaattgtttgatgtgacgaatcctt

SEQ ID NO: 78147 - DNA, 40 bp, Homo sapiens
aaggattcgtcacatcaaacaattgtgacattcacctaca

SEQ ID NO: 78148 - DNA, 40 bp, Homo sapiens
gtaggtgaatgtcacaattgtttgatgtgacgaatccttg

SEQ ID NO: 78149 - DNA, 40 bp, Homo sapiens
caaggattcgtcacatcaaacaattgtgacattcacctac

SEQ ID NO: 78150 - DNA, 40 bp, Homo sapiens
taggtgaatgtcacaattgtttgatgtgacgaatccttgt

SEQ ID NO: 78151 - DNA, 40 bp, Homo sapiens
acaaggattcgtcacatcaaacaattgtgacattcaccta

SEQ ID NO: 78152 - DNA, 40 bp, Homo sapiens
aggtgaatgtcacaattgtttgatgtgacgaatccttgtt

SEQ ID NO: 78153 - DNA, 40 bp, Homo sapiens
aacaaggattcgtcacatcaaacaattgtgacattcacct

SEQ ID NO: 78154 - DNA, 40 bp, Homo sapiens
ggtgaatgtcacaattgtttgatgtgacgaatccttgttt

SEQ ID NO: 78155 - DNA, 40 bp, Homo sapiens
aaacaaggattcgtcacatcaaacaattgtgacattcacc

SEQ ID NO: 78156 - DNA, 40 bp, Homo sapiens
gtgaatgtcacaattgtttgatgtgacgaatccttgtttt

SEQ ID NO: 78157 - DNA, 40 bp, Homo sapiens
aaaacaaggattcgtcacatcaaacaattgtgacattcac

SEQ ID NO: 78158 - DNA, 40 bp, Homo sapiens
tgaatgtcacaattgtttgatgtgacgaatccttgttttt

SEQ ID NO: 78159 - DNA, 40 bp, Homo sapiens
aaaaacaaggattcgtcacatcaaacaattgtgacattca

SEQ ID NO: 78160 - DNA, 40 bp, Homo sapiens
gaatgtcacaattgtttgatgtgacgaatccttgtttttc

SEQ ID NO: 78161 - DNA, 40 bp, Homo sapiens
gaaaaacaaggattcgtcacatcaaacaattgtgacattc

SEQ ID NO: 78162 - DNA, 40 bp, Homo sapiens
aatgtcacaattgtttgatgtgacgaatccttgtttttca

SEQ ID NO: 78163 - DNA, 40 bp, Homo sapiens
tgaaaaacaaggattcgtcacatcaaacaattgtgacatt

SEQ ID NO: 78164 - DNA, 40 bp, Homo sapiens
atgtcacaattgtttgatgtgacgaatccttgtttttcag

SEQ ID NO: 78165 - DNA, 40 bp, Homo sapiens
ctgaaaaacaaggattcgtcacatcaaacaattgtgacat

SEQ ID NO: 78166 - DNA, 40 bp, Homo sapiens
tgtcacaattgtttgatgtgacgaatccttgtttttcagt

SEQ ID NO: 78167 - DNA, 40 bp, Homo sapiens
actgaaaaacaaggattcgtcacatcaaacaattgtgaca

SEQ ID NO: 78168 - DNA, 40 bp, Homo sapiens
gtcacaattgtttgatgtgacgaatccttgtttttcagta

SEQ ID NO: 78169 - DNA, 40 bp, Homo sapiens
tactgaaaaacaaggattcgtcacatcaaacaattgtgac

SEQ ID NO: 78170 - DNA, 40 bp, Homo sapiens
tcacaattgtttgatgtgacgaatccttgtttttcagtac

SEQ ID NO: 78171 - DNA, 40 bp, Homo sapiens
gtactgaaaaacaaggattcgtcacatcaaacaattgtga

SEQ ID NO: 78172 - DNA, 40 bp, Homo sapiens
cacaattgtttgatgtgacgaatccttgtttttcagtaca

SEQ ID NO: 78173 - DNA, 40 bp, Homo sapiens
tgtactgaaaaacaaggattcgtcacatcaaacaattgtg

SEQ ID NO: 78174 - DNA, 40 bp, Homo sapiens
acaattgtttgatgtgacgaatccttgtttttcagtacac

SEQ ID NO: 78175 - DNA, 40 bp, Homo sapiens
gtgtactgaaaaacaaggattcgtcacatcaaacaattgt

SEQ ID NO: 78176 - DNA, 40 bp, Homo sapiens
caattgtttgatgtgacgaatccttgtttttcagtacacg

SEQ ID NO: 78177 - DNA, 40 bp, Homo sapiens
cgtgtactgaaaaacaaggattcgtcacatcaaacaattg

SEQ ID NO: 78178 - DNA, 40 bp, Homo sapiens
aattgtttgatgtgacgaatccttgtttttcagtacacgt

SEQ ID NO: 78179 - DNA, 40 bp, Homo sapiens
acgtgtactgaaaaacaaggattcgtcacatcaaacaatt

SEQ ID NO: 78180 - DNA, 40 bp, Homo sapiens
attgtttgatgtgacgaatccttgtttttcagtacacgtg

SEQ ID NO: 78181 - DNA, 40 bp, Homo sapiens
cacgtgtactgaaaaacaaggattcgtcacatcaaacaat

SEQ ID NO: 78182 - DNA, 40 bp, Homo sapiens
ttgtttgatgtgacgaatccttgtttttcagtacacgtgg

SEQ ID NO: 78183 - DNA, 40 bp, Homo sapiens
ccacgtgtactgaaaaacaaggattcgtcacatcaaacaa

SEQ ID NO: 78184 - DNA, 40 bp, Homo sapiens
tgtttgatgtgacgaatccttgtttttcagtacacgtgga

SEQ ID NO: 78185 - DNA, 40 bp, Homo sapiens
tccacgtgtactgaaaaacaaggattcgtcacatcaaaca

SEQ ID NO: 78186 - DNA, 40 bp, Homo sapiens
gtttgatgtgacgaatccttgtttttcagtacacgtggaa

SEQ ID NO: 78187 - DNA, 40 bp, Homo sapiens
ttccacgtgtactgaaaaacaaggattcgtcacatcaaac

SEQ ID NO: 78188 - DNA, 40 bp, Homo sapiens
tttgatgtgacgaatccttgtttttcagtacacgtggaag

SEQ ID NO: 78189 - DNA, 40 bp, Homo sapiens
cttccacgtgtactgaaaaacaaggattcgtcacatcaaa

SEQ ID NO: 78190 - DNA, 40 bp, Homo sapiens
ttgatgtgacgaatccttgtttttcagtacacgtggaagt

SEQ ID NO: 78191 - DNA, 40 bp, Homo sapiens
acttccacgtgtactgaaaaacaaggattcgtcacatcaa

SEQ ID NO: 78192 - DNA, 40 bp, Homo sapiens
tgatgtgacgaatccttgtttttcagtacacgtggaagta

SEQ ID NO: 78193 - DNA, 40 bp, Homo sapiens
tacttccacgtgtactgaaaaacaaggattcgtcacatca

SEQ ID NO: 78194 - DNA, 40 bp, Homo sapiens
gatgtgacgaatccttgtttttcagtacacgtggaagtaa

SEQ ID NO: 78195 - DNA, 40 bp, Homo sapiens
ttacttccacgtgtactgaaaaacaaggattcgtcacatc

SEQ ID NO: 78196 - DNA, 40 bp, Homo sapiens
atgtgacgaatccttgtttttcagtacacgtggaagtaat

SEQ ID NO: 78197 - DNA, 40 bp, Homo sapiens
attacttccacgtgtactgaaaaacaaggattcgtcacat

SEQ ID NO: 78198 - DNA, 40 bp, Homo sapiens
tgtgacgaatccttgtttttcagtacacgtggaagtaatt

SEQ ID NO: 78199 - DNA, 40 bp, Homo sapiens
aattacttccacgtgtactgaaaaacaaggattcgtcaca

SEQ ID NO: 78200 - DNA, 40 bp, Homo sapiens
gtgacgaatccttgtttttcagtacacgtggaagtaattc

SEQ ID NO: 78201 - DNA, 40 bp, Homo sapiens
gaattacttccacgtgtactgaaaaacaaggattcgtcac

SEQ ID NO: 78202 - DNA, 40 bp, Homo sapiens
tgacgaatccttgtttttcagtacacgtggaagtaattca

SEQ ID NO: 78203 - DNA, 40 bp, Homo sapiens
tgaattacttccacgtgtactgaaaaacaaggattcgtca

SEQ ID NO: 78204 - DNA, 40 bp, Homo sapiens
gacgaatccttgtttttcagtacacgtggaagtaattcat

SEQ ID NO: 78205 - DNA, 40 bp, Homo sapiens
atgaattacttccacgtgtactgaaaaacaaggattcgtc

SEQ ID NO: 78206 - DNA, 40 bp, Homo sapiens
acgaatccttgtttttcagtacacgtggaagtaattcata

SEQ ID NO: 78207 - DNA, 40 bp, Homo sapiens
tatgaattacttccacgtgtactgaaaaacaaggattcgt

SEQ ID NO: 78208 - DNA, 40 bp, Homo sapiens
cgaatccttgtttttcagtacacgtggaagtaattcatat

SEQ ID NO: 78209 - DNA, 40 bp, Homo sapiens
atatgaattacttccacgtgtactgaaaaacaaggattcg

SEQ ID NO: 78210 - DNA, 40 bp, Homo sapiens
gaatccttgtttttcagtacacgtggaagtaattcatata

SEQ ID NO: 78211 - DNA, 40 bp, Homo sapiens
tatatgaattacttccacgtgtactgaaaaacaaggattc

SEQ ID NO: 78212 - DNA, 40 bp, Homo sapiens
aatccttgtttttcagtacacgtggaagtaattcatataa

SEQ ID NO: 78213 - DNA, 40 bp, Homo sapiens
ttatatgaattacttccacgtgtactgaaaaacaaggatt

SEQ ID NO: 78214 - DNA, 40 bp, Homo sapiens
atccttgtttttcagtacacgtggaagtaattcatataaa

SEQ ID NO: 78215 - DNA, 40 bp, Homo sapiens
tttatatgaattacttccacgtgtactgaaaaacaaggat

SEQ ID NO: 78216 - DNA, 40 bp, Homo sapiens
tccttgtttttcagtacacgtggaagtaattcatataaaa

SEQ ID NO: 78217 - DNA, 40 bp, Homo sapiens
ttttatatgaattacttccacgtgtactgaaaaacaagga

SEQ ID NO: 78218 - DNA, 40 bp, Homo sapiens
ccttgtttttcagtacacgtggaagtaattcatataaaag

SEQ ID NO: 78219 - DNA, 40 bp, Homo sapiens
cttttatatgaattacttccacgtgtactgaaaaacaagg

SEQ ID NO: 78220 - DNA, 40 bp, Homo sapiens
cttgtttttcagtacacgtggaagtaattcatataaaaga

SEQ ID NO: 78221 - DNA, 40 bp, Homo sapiens
tcttttatatgaattacttccacgtgtactgaaaaacaag

SEQ ID NO: 78222 - DNA, 40 bp, Homo sapiens
ttgtttttcagtacacgtggaagtaattcatataaaagag

SEQ ID NO: 78223 - DNA, 40 bp, Homo sapiens
ctcttttatatgaattacttccacgtgtactgaaaaacaa

SEQ ID NO: 78224 - DNA, 40 bp, Homo sapiens
tgtttttcagtacacgtggaagtaattcatataaaagaga

SEQ ID NO: 78225 - DNA, 40 bp, Homo sapiens
tctcttttatatgaattacttccacgtgtactgaaaaaca

SEQ ID NO: 78226 - DNA, 40 bp, Homo sapiens
gtttttcagtacacgtggaagtaattcatataaaagagaa

SEQ ID NO: 78227 - DNA, 40 bp, Homo sapiens
ttctcttttatatgaattacttccacgtgtactgaaaaac

SEQ ID NO: 78228 - DNA, 40 bp, Homo sapiens
tttttcagtacacgtggaagtaattcatataaaagagaag

SEQ ID NO: 78229 - DNA, 40 bp, Homo sapiens
cttctcttttatatgaattacttccacgtgtactgaaaaa

SEQ ID NO: 78230 - DNA, 40 bp, Homo sapiens
ttttcagtacacgtggaagtaattcatataaaagagaagt

SEQ ID NO: 78231 - DNA, 40 bp, Homo sapiens
acttctcttttatatgaattacttccacgtgtactgaaaa

SEQ ID NO: 78232 - DNA, 40 bp, Homo sapiens
tttcagtacacgtggaagtaattcatataaaagagaagta

SEQ ID NO: 78233 - DNA, 40 bp, Homo sapiens
tacttctcttttatatgaattacttccacgtgtactgaaa

SEQ ID NO: 78234 - DNA, 40 bp, Homo sapiens
ttcagtacacgtggaagtaattcatataaaagagaagtat

SEQ ID NO: 78235 - DNA, 40 bp, Homo sapiens
atacttctcttttatatgaattacttccacgtgtactgaa

SEQ ID NO: 78236 - DNA, 40 bp, Homo sapiens
tcagtacacgtggaagtaattcatataaaagagaagtata

SEQ ID NO: 78237 - DNA, 40 bp, Homo sapiens
tatacttctcttttatatgaattacttccacgtgtactga

SEQ ID NO: 78238 - DNA, 40 bp, Homo sapiens
cagtacacgtggaagtaattcatataaaagagaagtatac

SEQ ID NO: 78239 - DNA, 40 bp, Homo sapiens
gtatacttctcttttatatgaattacttccacgtgtactg

SEQ ID NO: 78240 - DNA, 40 bp, Homo sapiens
agtacacgtggaagtaattcatataaaagagaagtatact

SEQ ID NO: 78241 - DNA, 40 bp, Homo sapiens
agtatacttctcttttatatgaattacttccacgtgtact

SEQ ID NO: 78242 - DNA, 40 bp, Homo sapiens
gtacacgtggaagtaattcatataaaagagaagtatactt

SEQ ID NO: 78243 - DNA, 40 bp, Homo sapiens
aagtatacttctcttttatatgaattacttccacgtgtac

SEQ ID NO: 78244 - DNA, 40 bp, Homo sapiens
tacacgtggaagtaattcatataaaagagaagtatacttg

SEQ ID NO: 78245 - DNA, 40 bp, Homo sapiens
caagtatacttctcttttatatgaattacttccacgtgta

SEQ ID NO: 78246 - DNA, 40 bp, Homo sapiens
acacgtggaagtaattcatataaaagagaagtatacttgg

SEQ ID NO: 78247 - DNA, 40 bp, Homo sapiens
ccaagtatacttctcttttatatgaattacttccacgtgt

SEQ ID NO: 78248 - DNA, 40 bp, Homo sapiens
cacgtggaagtaattcatataaaagagaagtatacttggt

SEQ ID NO: 78249 - DNA, 40 bp, Homo sapiens
accaagtatacttctcttttatatgaattacttccacgtg

SEQ ID NO: 78250 - DNA, 40 bp, Homo sapiens
acgtggaagtaattcatataaaagagaagtatacttggta

SEQ ID NO: 78251 - DNA, 40 bp, Homo sapiens
taccaagtatacttctcttttatatgaattacttccacgt

SEQ ID NO: 78252 - DNA, 40 bp, Homo sapiens
cgtggaagtaattcatataaaagagaagtatacttggtaa

SEQ ID NO: 78253 - DNA, 40 bp, Homo sapiens
ttaccaagtatacttctcttttatatgaattacttccacg

SEQ ID NO: 78254 - DNA, 40 bp, Homo sapiens
gtggaagtaattcatataaaagagaagtatacttggtaat

SEQ ID NO: 78255 - DNA, 40 bp, Homo sapiens
attaccaagtatacttctcttttatatgaattacttccac

SEQ ID NO: 78256 - DNA, 40 bp, Homo sapiens
tggaagtaattcatataaaagagaagtatacttggtaatt

SEQ ID NO: 78257 - DNA, 40 bp, Homo sapiens
aattaccaagtatacttctcttttatatgaattacttcca

SEQ ID NO: 78258 - DNA, 40 bp, Homo sapiens
ggaagtaattcatataaaagagaagtatacttggtaatta

SEQ ID NO: 78259 - DNA, 40 bp, Homo sapiens
taattaccaagtatacttctcttttatatgaattacttcc

SEQ ID NO: 78260 - DNA, 40 bp, Homo sapiens
gaagtaattcatataaaagagaagtatacttggtaattaa

SEQ ID NO: 78261 - DNA, 40 bp, Homo sapiens
ttaattaccaagtatacttctcttttatatgaattacttc

SEQ ID NO: 78262 - DNA, 40 bp, Homo sapiens
aagtaattcatataaaagagaagtatacttggtaattaaa

SEQ ID NO: 78263 - DNA, 40 bp, Homo sapiens
tttaattaccaagtatacttctcttttatatgaattactt

SEQ ID NO: 78264 - DNA, 40 bp, Homo sapiens
agtaattcatataaaagagaagtatacttggtaattaaaa

SEQ ID NO: 78265 - DNA, 40 bp, Homo sapiens
ttttaattaccaagtatacttctcttttatatgaattact

SEQ ID NO: 78266 - DNA, 40 bp, Homo sapiens
gtaattcatataaaagagaagtatacttggtaattaaaaa

SEQ ID NO: 78267 - DNA, 40 bp, Homo sapiens
tttttaattaccaagtatacttctcttttatatgaattac

SEQ ID NO: 78268 - DNA, 40 bp, Homo sapiens
taattcatataaaagagaagtatacttggtaattaaaaat

SEQ ID NO: 78269 - DNA, 40 bp, Homo sapiens
atttttaattaccaagtatacttctcttttatatgaatta

SEQ ID NO: 78270 - DNA, 40 bp, Homo sapiens
aattcatataaaagagaagtatacttggtaattaaaaatt

SEQ ID NO: 78271 - DNA, 40 bp, Homo sapiens
aatttttaattaccaagtatacttctcttttatatgaatt

SEQ ID NO: 78272 - DNA, 40 bp, Homo sapiens
attcatataaaagagaagtatacttggtaattaaaaattt

SEQ ID NO: 78273 - DNA, 40 bp, Homo sapiens
aaatttttaattaccaagtatacttctcttttatatgaat

SEQ ID NO: 78274 - DNA, 40 bp, Homo sapiens
ttcatataaaagagaagtatacttggtaattaaaaattta

SEQ ID NO: 78275 - DNA, 40 bp, Homo sapiens
taaatttttaattaccaagtatacttctcttttatatgaa

SEQ ID NO: 78276 - DNA, 40 bp, Homo sapiens
tcatataaaagagaagtatacttggtaattaaaaatttaa

SEQ ID NO: 78277 - DNA, 40 bp, Homo sapiens
ttaaatttttaattaccaagtatacttctcttttatatga

SEQ ID NO: 78278 - DNA, 40 bp, Homo sapiens
catataaaagagaagtatacttggtaattaaaaatttaaa

SEQ ID NO: 78279 - DNA, 40 bp, Homo sapiens
tttaaatttttaattaccaagtatacttctcttttatatg

SEQ ID NO: 78280 - DNA, 40 bp, Homo sapiens
atataaaagagaagtatacttggtaattaaaaatttaaaa

SEQ ID NO: 78281 - DNA, 40 bp, Homo sapiens
ttttaaatttttaattaccaagtatacttctcttttatat

SEQ ID NO: 78282 - DNA, 40 bp, Homo sapiens
tataaaagagaagtatacttggtaattaaaaatttaaaat

SEQ ID NO: 78283 - DNA, 40 bp, Homo sapiens
attttaaatttttaattaccaagtatacttctcttttata

SEQ ID NO: 78284 - DNA, 40 bp, Homo sapiens
ataaaagagaagtatacttggtaattaaaaatttaaaatt

SEQ ID NO: 78285 - DNA, 40 bp, Homo sapiens
aattttaaatttttaattaccaagtatacttctcttttat

SEQ ID NO: 78286 - DNA, 40 bp, Homo sapiens
taaaagagaagtatacttggtaattaaaaatttaaaatta

SEQ ID NO: 78287 - DNA, 40 bp, Homo sapiens
taattttaaatttttaattaccaagtatacttctctttta

SEQ ID NO: 78288 - DNA, 40 bp, Homo sapiens
aaaagagaagtatacttggtaattaaaaatttaaaattaa

SEQ ID NO: 78289 - DNA, 40 bp, Homo sapiens
ttaattttaaatttttaattaccaagtatacttctctttt

SEQ ID NO: 78290 - DNA, 40 bp, Homo sapiens
aaagagaagtatacttggtaattaaaaatttaaaattaaa

SEQ ID NO: 78291 - DNA, 40 bp, Homo sapiens
tttaattttaaatttttaattaccaagtatacttctcttt

SEQ ID NO: 78292 - DNA, 40 bp, Homo sapiens
aagagaagtatacttggtaattaaaaatttaaaattaaat

SEQ ID NO: 78293 - DNA, 40 bp, Homo sapiens
atttaattttaaatttttaattaccaagtatacttctctt

SEQ ID NO: 78294 - DNA, 40 bp, Homo sapiens
agagaagtatacttggtaattaaaaatttaaaattaaata

SEQ ID NO: 78295 - DNA, 40 bp, Homo sapiens
tatttaattttaaatttttaattaccaagtatacttctct

SEQ ID NO: 78296 - DNA, 40 bp, Homo sapiens
gagaagtatacttggtaattaaaaatttaaaattaaatac

SEQ ID NO: 78297 - DNA, 40 bp, Homo sapiens
gtatttaattttaaatttttaattaccaagtatacttctc

SEQ ID NO: 78298 - DNA, 40 bp, Homo sapiens
agaagtatacttggtaattaaaaatttaaaattaaataca

SEQ ID NO: 78299 - DNA, 40 bp, Homo sapiens
tgtatttaattttaaatttttaattaccaagtatacttct

SEQ ID NO: 78300 - DNA, 40 bp, Homo sapiens
gaagtatacttggtaattaaaaatttaaaattaaatacaa

SEQ ID NO: 78301 - DNA, 40 bp, Homo sapiens
ttgtatttaattttaaatttttaattaccaagtatacttc

SEQ ID NO: 78302 - DNA, 40 bp, Homo sapiens
aagtatacttggtaattaaaaatttaaaattaaatacaat

SEQ ID NO: 78303 - DNA, 40 bp, Homo sapiens
attgtatttaattttaaatttttaattaccaagtatactt

SEQ ID NO: 78304 - DNA, 40 bp, Homo sapiens
agtatacttggtaattaaaaatttaaaattaaatacaatt

SEQ ID NO: 78305 - DNA, 40 bp, Homo sapiens
aattgtatttaattttaaatttttaattaccaagtatact

SEQ ID NO: 78306 - DNA, 40 bp, Homo sapiens
gtatacttggtaattaaaaatttaaaattaaatacaattt

SEQ ID NO: 78307 - DNA, 40 bp, Homo sapiens
aaattgtatttaattttaaatttttaattaccaagtatac

SEQ ID NO: 78308 - DNA, 40 bp, Homo sapiens
tatacttggtaattaaaaatttaaaattaaatacaattta

SEQ ID NO: 78309 - DNA, 40 bp, Homo sapiens
taaattgtatttaattttaaatttttaattaccaagtata

SEQ ID NO: 78310 - DNA, 40 bp, Homo sapiens
atacttggtaattaaaaatttaaaattaaatacaatttaa

SEQ ID NO: 78311 - DNA, 40 bp, Homo sapiens
ttaaattgtatttaattttaaatttttaattaccaagtat

SEQ ID NO: 78312 - DNA, 40 bp, Homo sapiens
tacttggtaattaaaaatttaaaattaaatacaatttaaa

SEQ ID NO: 78313 - DNA, 40 bp, Homo sapiens
tttaaattgtatttaattttaaatttttaattaccaagta

SEQ ID NO: 78314 - DNA, 40 bp, Homo sapiens
acttggtaattaaaaatttaaaattaaatacaatttaaaa

SEQ ID NO: 78315 - DNA, 40 bp, Homo sapiens
ttttaaattgtatttaattttaaatttttaattaccaagt

SEQ ID NO: 78316 - DNA, 40 bp, Homo sapiens
cttggtaattaaaaatttaaaattaaatacaatttaaaaa

SEQ ID NO: 78317 - DNA, 40 bp, Homo sapiens
tttttaaattgtatttaattttaaatttttaattaccaag

SEQ ID NO: 78318 - DNA, 40 bp, Homo sapiens
ttggtaattaaaaatttaaaattaaatacaatttaaaaaa

SEQ ID NO: 78319 - DNA, 40 bp, Homo sapiens
ttttttaaattgtatttaattttaaatttttaattaccaa

SEQ ID NO: 78320 - DNA, 40 bp, Homo sapiens
tggtaattaaaaatttaaaattaaatacaatttaaaaaaa

SEQ ID NO: 78321 - DNA, 40 bp, Homo sapiens
tttttttaaattgtatttaattttaaatttttaattacca

SEQ ID NO: 78322 - DNA, 40 bp, Homo sapiens
ggtaattaaaaatttaaaattaaatacaatttaaaaaaaa

SEQ ID NO: 78323 - DNA, 40 bp, Homo sapiens
ttttttttaaattgtatttaattttaaatttttaattacc

SEQ ID NO: 78324 - DNA, 40 bp, Homo sapiens
gtaattaaaaatttaaaattaaatacaatttaaaaaaaaa

SEQ ID NO: 78325 - DNA, 40 bp, Homo sapiens
tttttttttaaattgtatttaattttaaatttttaattac

SEQ ID NO: 78326 - DNA, 40 bp, Homo sapiens
taattaaaaatttaaaattaaatacaatttaaaaaaaaat

SEQ ID NO: 78327 - DNA, 40 bp, Homo sapiens
atttttttttaaattgtatttaattttaaatttttaatta

SEQ ID NO: 78328 - DNA, 40 bp, Homo sapiens
aattaaaaatttaaaattaaatacaatttaaaaaaaaatt

SEQ ID NO: 78329 - DNA, 40 bp, Homo sapiens
aatttttttttaaattgtatttaattttaaatttttaatt

SEQ ID NO: 78330 - DNA, 40 bp, Homo sapiens
attaaaaatttaaaattaaatacaatttaaaaaaaaattt

SEQ ID NO: 78331 - DNA, 40 bp, Homo sapiens
aaatttttttttaaattgtatttaattttaaatttttaat

SEQ ID NO: 78332 - DNA, 40 bp, Homo sapiens
ttaaaaatttaaaattaaatacaatttaaaaaaaaattta

SEQ ID NO: 78333 - DNA, 40 bp, Homo sapiens
taaatttttttttaaattgtatttaattttaaatttttaa

SEQ ID NO: 78334 - DNA, 40 bp, Homo sapiens
taaaaatttaaaattaaatacaatttaaaaaaaaatttat

SEQ ID NO: 78335 - DNA, 40 bp, Homo sapiens
ataaatttttttttaaattgtatttaattttaaattttta

SEQ ID NO: 78336 - DNA, 40 bp, Homo sapiens
aaaaatttaaaattaaatacaatttaaaaaaaaatttatt

SEQ ID NO: 78337 - DNA, 40 bp, Homo sapiens
aataaatttttttttaaattgtatttaattttaaattttt

SEQ ID NO: 78338 - DNA, 40 bp, Homo sapiens
aaaatttaaaattaaatacaatttaaaaaaaaatttattt

SEQ ID NO: 78339 - DNA, 40 bp, Homo sapiens
aaataaatttttttttaaattgtatttaattttaaatttt

SEQ ID NO: 78340 - DNA, 40 bp, Homo sapiens
aaatttaaaattaaatacaatttaaaaaaaaatttatttg

SEQ ID NO: 78341 - DNA, 40 bp, Homo sapiens
caaataaatttttttttaaattgtatttaattttaaattt

SEQ ID NO: 78342 - DNA, 40 bp, Homo sapiens
aatttaaaattaaatacaatttaaaaaaaaatttatttga

SEQ ID NO: 78343 - DNA, 40 bp, Homo sapiens
tcaaataaatttttttttaaattgtatttaattttaaatt

SEQ ID NO: 78344 - DNA, 40 bp, Homo sapiens
atttaaaattaaatacaatttaaaaaaaaatttatttgac

SEQ ID NO: 78345 - DNA, 40 bp, Homo sapiens
gtcaaataaatttttttttaaattgtatttaattttaaat

SEQ ID NO: 78346 - DNA, 40 bp, Homo sapiens
tttaaaattaaatacaatttaaaaaaaaatttatttgaca

SEQ ID NO: 78347 - DNA, 40 bp, Homo sapiens
tgtcaaataaatttttttttaaattgtatttaattttaaa

SEQ ID NO: 78348 - DNA, 40 bp, Homo sapiens
ttaaaattaaatacaatttaaaaaaaaatttatttgacaa

SEQ ID NO: 78349 - DNA, 40 bp, Homo sapiens
ttgtcaaataaatttttttttaaattgtatttaattttaa

SEQ ID NO: 78350 - DNA, 40 bp, Homo sapiens
taaaattaaatacaatttaaaaaaaaatttatttgacaag

SEQ ID NO: 78351 - DNA, 40 bp, Homo sapiens
cttgtcaaataaatttttttttaaattgtatttaatttta

SEQ ID NO: 78352 - DNA, 40 bp, Homo sapiens
aaaattaaatacaatttaaaaaaaaatttatttgacaagc

SEQ ID NO: 78353 - DNA, 40 bp, Homo sapiens
gcttgtcaaataaatttttttttaaattgtatttaatttt

SEQ ID NO: 78354 - DNA, 40 bp, Homo sapiens
aaattaaatacaatttaaaaaaaaatttatttgacaagct

SEQ ID NO: 78355 - DNA, 40 bp, Homo sapiens
agcttgtcaaataaatttttttttaaattgtatttaattt

SEQ ID NO: 78356 - DNA, 40 bp, Homo sapiens
aattaaatacaatttaaaaaaaaatttatttgacaagctg

SEQ ID NO: 78357 - DNA, 40 bp, Homo sapiens
cagcttgtcaaataaatttttttttaaattgtatttaatt

SEQ ID NO: 78358 - DNA, 40 bp, Homo sapiens
attaaatacaatttaaaaaaaaatttatttgacaagctgg

SEQ ID NO: 78359 - DNA, 40 bp, Homo sapiens
ccagcttgtcaaataaatttttttttaaattgtatttaat

SEQ ID NO: 78360 - DNA, 40 bp, Homo sapiens
ttaaatacaatttaaaaaaaaatttatttgacaagctggc

SEQ ID NO: 78361 - DNA, 40 bp, Homo sapiens
gccagcttgtcaaataaatttttttttaaattgtatttaa

SEQ ID NO: 78362 - DNA, 40 bp, Homo sapiens
taaatacaatttaaaaaaaaatttatttgacaagctggct

SEQ ID NO: 78363 - DNA, 40 bp, Homo sapiens
agccagcttgtcaaataaatttttttttaaattgtattta

SEQ ID NO: 78364 - DNA, 40 bp, Homo sapiens
aaatacaatttaaaaaaaaatttatttgacaagctggctg

SEQ ID NO: 78365 - DNA, 40 bp, Homo sapiens
cagccagcttgtcaaataaatttttttttaaattgtattt

SEQ ID NO: 78366 - DNA, 40 bp, Homo sapiens
aatacaatttaaaaaaaaatttatttgacaagctggctgt

SEQ ID NO: 78367 - DNA, 40 bp, Homo sapiens
acagccagcttgtcaaataaatttttttttaaattgtatt

SEQ ID NO: 78368 - DNA, 40 bp, Homo sapiens
atacaatttaaaaaaaaatttatttgacaagctggctgtg

SEQ ID NO: 78369 - DNA, 40 bp, Homo sapiens
cacagccagcttgtcaaataaatttttttttaaattgtat

SEQ ID NO: 78370 - DNA, 40 bp, Homo sapiens
tacaatttaaaaaaaaatttatttgacaagctggctgtgg

SEQ ID NO: 78371 - DNA, 40 bp, Homo sapiens
ccacagccagcttgtcaaataaatttttttttaaattgta

SEQ ID NO: 78372 - DNA, 40 bp, Homo sapiens
acaatttaaaaaaaaatttatttgacaagctggctgtggt

SEQ ID NO: 78373 - DNA, 40 bp, Homo sapiens
accacagccagcttgtcaaataaatttttttttaaattgt

SEQ ID NO: 78374 - DNA, 40 bp, Homo sapiens
caatttaaaaaaaaatttatttgacaagctggctgtggtg

SEQ ID NO: 78375 - DNA, 40 bp, Homo sapiens
caccacagccagcttgtcaaataaatttttttttaaattg

SEQ ID NO: 78376 - DNA, 40 bp, Homo sapiens
aatttaaaaaaaaatttatttgacaagctggctgtggtgt

SEQ ID NO: 78377 - DNA, 40 bp, Homo sapiens
acaccacagccagcttgtcaaataaatttttttttaaatt

SEQ ID NO: 78378 - DNA, 40 bp, Homo sapiens
atttaaaaaaaaatttatttgacaagctggctgtggtgtg

SEQ ID NO: 78379 - DNA, 40 bp, Homo sapiens
cacaccacagccagcttgtcaaataaatttttttttaaat

SEQ ID NO: 78380 - DNA, 40 bp, Homo sapiens
tttaaaaaaaaatttatttgacaagctggctgtggtgtgt

SEQ ID NO: 78381 - DNA, 40 bp, Homo sapiens
acacaccacagccagcttgtcaaataaatttttttttaaa

SEQ ID NO: 78382 - DNA, 40 bp, Homo sapiens
ttaaaaaaaaatttatttgacaagctggctgtggtgtgtg

SEQ ID NO: 78383 - DNA, 40 bp, Homo sapiens
cacacaccacagccagcttgtcaaataaatttttttttaa

SEQ ID NO: 78384 - DNA, 40 bp, Homo sapiens
taaaaaaaaatttatttgacaagctggctgtggtgtgtgt

SEQ ID NO: 78385 - DNA, 40 bp, Homo sapiens
acacacaccacagccagcttgtcaaataaattttttttta

SEQ ID NO: 78386 - DNA, 40 bp, Homo sapiens
aaaaaaaaatttatttgacaagctggctgtggtgtgtgtg

SEQ ID NO: 78387 - DNA, 40 bp, Homo sapiens
cacacacaccacagccagcttgtcaaataaattttttttt

SEQ ID NO: 78388 - DNA, 40 bp, Homo sapiens
aaaaaaaatttatttgacaagctggctgtggtgtgtgtgc

SEQ ID NO: 78389 - DNA, 40 bp, Homo sapiens
gcacacacaccacagccagcttgtcaaataaatttttttt

SEQ ID NO: 78390 - DNA, 40 bp, Homo sapiens
aaaaaaatttatttgacaagctggctgtggtgtgtgtgcc

SEQ ID NO: 78391 - DNA, 40 bp, Homo sapiens
ggcacacacaccacagccagcttgtcaaataaattttttt

SEQ ID NO: 78392 - DNA, 40 bp, Homo sapiens
aaaaaatttatttgacaagctggctgtggtgtgtgtgcct

SEQ ID NO: 78393 - DNA, 40 bp, Homo sapiens
aggcacacacaccacagccagcttgtcaaataaatttttt

SEQ ID NO: 78394 - DNA, 40 bp, Homo sapiens
aaaaatttatttgacaagctggctgtggtgtgtgtgcctg

SEQ ID NO: 78395 - DNA, 40 bp, Homo sapiens
caggcacacacaccacagccagcttgtcaaataaattttt

SEQ ID NO: 78396 - DNA, 40 bp, Homo sapiens
aaaatttatttgacaagctggctgtggtgtgtgtgcctgt

SEQ ID NO: 78397 - DNA, 40 bp, Homo sapiens
acaggcacacacaccacagccagcttgtcaaataaatttt

SEQ ID NO: 78398 - DNA, 40 bp, Homo sapiens
aaatttatttgacaagctggctgtggtgtgtgtgcctgta

SEQ ID NO: 78399 - DNA, 40 bp, Homo sapiens
tacaggcacacacaccacagccagcttgtcaaataaattt

SEQ ID NO: 78400 - DNA, 40 bp, Homo sapiens
aatttatttgacaagctggctgtggtgtgtgtgcctgtag

SEQ ID NO: 78401 - DNA, 40 bp, Homo sapiens
ctacaggcacacacaccacagccagcttgtcaaataaatt

SEQ ID NO: 78402 - DNA, 40 bp, Homo sapiens
atttatttgacaagctggctgtggtgtgtgtgcctgtagt

SEQ ID NO: 78403 - DNA, 40 bp, Homo sapiens
actacaggcacacacaccacagccagcttgtcaaataaat

SEQ ID NO: 78404 - DNA, 40 bp, Homo sapiens
tttatttgacaagctggctgtggtgtgtgtgcctgtagta

SEQ ID NO: 78405 - DNA, 40 bp, Homo sapiens
tactacaggcacacacaccacagccagcttgtcaaataaa

SEQ ID NO: 78406 - DNA, 40 bp, Homo sapiens
ttatttgacaagctggctgtggtgtgtgtgcctgtagtat

SEQ ID NO: 78407 - DNA, 40 bp, Homo sapiens
atactacaggcacacacaccacagccagcttgtcaaataa

SEQ ID NO: 78408 - DNA, 40 bp, Homo sapiens
tatttgacaagctggctgtggtgtgtgtgcctgtagtatc

SEQ ID NO: 78409 - DNA, 40 bp, Homo sapiens
gatactacaggcacacacaccacagccagcttgtcaaata

SEQ ID NO: 78410 - DNA, 40 bp, Homo sapiens
atttgacaagctggctgtggtgtgtgtgcctgtagtatca

SEQ ID NO: 78411 - DNA, 40 bp, Homo sapiens
tgatactacaggcacacacaccacagccagcttgtcaaat

SEQ ID NO: 78412 - DNA, 40 bp, Homo sapiens
tttgacaagctggctgtggtgtgtgtgcctgtagtatcag

SEQ ID NO: 78413 - DNA, 40 bp, Homo sapiens
ctgatactacaggcacacacaccacagccagcttgtcaaa

SEQ ID NO: 78414 - DNA, 40 bp, Homo sapiens
ttgacaagctggctgtggtgtgtgtgcctgtagtatcagc

SEQ ID NO: 78415 - DNA, 40 bp, Homo sapiens
gctgatactacaggcacacacaccacagccagcttgtcaa

SEQ ID NO: 78416 - DNA, 40 bp, Homo sapiens
tgacaagctggctgtggtgtgtgtgcctgtagtatcagct

SEQ ID NO: 78417 - DNA, 40 bp, Homo sapiens
agctgatactacaggcacacacaccacagccagcttgtca

SEQ ID NO: 78418 - DNA, 40 bp, Homo sapiens
gacaagctggctgtggtgtgtgtgcctgtagtatcagctg

SEQ ID NO: 78419 - DNA, 40 bp, Homo sapiens
cagctgatactacaggcacacacaccacagccagcttgtc

SEQ ID NO: 78420 - DNA, 40 bp, Homo sapiens
acaagctggctgtggtgtgtgtgcctgtagtatcagctgc

SEQ ID NO: 78421 - DNA, 40 bp, Homo sapiens
gcagctgatactacaggcacacacaccacagccagcttgt

SEQ ID NO: 78422 - DNA, 40 bp, Homo sapiens
caagctggctgtggtgtgtgtgcctgtagtatcagctgct

SEQ ID NO: 78423 - DNA, 40 bp, Homo sapiens
agcagctgatactacaggcacacacaccacagccagcttg

SEQ ID NO: 78424 - DNA, 40 bp, Homo sapiens
aagctggctgtggtgtgtgtgcctgtagtatcagctgctt

SEQ ID NO: 78425 - DNA, 40 bp, Homo sapiens
aagcagctgatactacaggcacacacaccacagccagctt

SEQ ID NO: 78426 - DNA, 40 bp, Homo sapiens
agctggctgtggtgtgtgtgcctgtagtatcagctgcttg

SEQ ID NO: 78427 - DNA, 40 bp, Homo sapiens
caagcagctgatactacaggcacacacaccacagccagct

SEQ ID NO: 78428 - DNA, 40 bp, Homo sapiens
gctggctgtggtgtgtgtgcctgtagtatcagctgcttgg

SEQ ID NO: 78429 - DNA, 40 bp, Homo sapiens
ccaagcagctgatactacaggcacacacaccacagccagc

SEQ ID NO: 78430 - DNA, 40 bp, Homo sapiens
ctggctgtggtgtgtgtgcctgtagtatcagctgcttggg

SEQ ID NO: 78431 - DNA, 40 bp, Homo sapiens
cccaagcagctgatactacaggcacacacaccacagccag

SEQ ID NO: 78432 - DNA, 40 bp, Homo sapiens
tggctgtggtgtgtgtgcctgtagtatcagctgcttggga

SEQ ID NO: 78433 - DNA, 40 bp, Homo sapiens
tcccaagcagctgatactacaggcacacacaccacagcca

SEQ ID NO: 78434 - DNA, 40 bp, Homo sapiens
ggctgtggtgtgtgtgcctgtagtatcagctgcttgggag

SEQ ID NO: 78435 - DNA, 40 bp, Homo sapiens
ctcccaagcagctgatactacaggcacacacaccacagcc

SEQ ID NO: 78436 - DNA, 40 bp, Homo sapiens
gctgtggtgtgtgtgcctgtagtatcagctgcttgggagc

SEQ ID NO: 78437 - DNA, 40 bp, Homo sapiens
gctcccaagcagctgatactacaggcacacacaccacagc

SEQ ID NO: 78438 - DNA, 40 bp, Homo sapiens
ctgtggtgtgtgtgcctgtagtatcagctgcttgggagcc

SEQ ID NO: 78439 - DNA, 40 bp, Homo sapiens
ggctcccaagcagctgatactacaggcacacacaccacag

SEQ ID NO: 78440 - DNA, 40 bp, Homo sapiens
tgtggtgtgtgtgcctgtagtatcagctgcttgggagcct

SEQ ID NO: 78441 - DNA, 40 bp, Homo sapiens
aggctcccaagcagctgatactacaggcacacacaccaca

SEQ ID NO: 78442 - DNA, 40 bp, Homo sapiens
gtggtgtgtgtgcctgtagtatcagctgcttgggagcctg

SEQ ID NO: 78443 - DNA, 40 bp, Homo sapiens
caggctcccaagcagctgatactacaggcacacacaccac

SEQ ID NO: 78444 - DNA, 40 bp, Homo sapiens
tggtgtgtgtgcctgtagtatcagctgcttgggagcctga

SEQ ID NO: 78445 - DNA, 40 bp, Homo sapiens
tcaggctcccaagcagctgatactacaggcacacacacca

SEQ ID NO: 78446 - DNA, 40 bp, Homo sapiens
ggtgtgtgtgcctgtagtatcagctgcttgggagcctgag

SEQ ID NO: 78447 - DNA, 40 bp, Homo sapiens
ctcaggctcccaagcagctgatactacaggcacacacacc

SEQ ID NO: 78448 - DNA, 40 bp, Homo sapiens
gtgtgtgtgcctgtagtatcagctgcttgggagcctgagg

SEQ ID NO: 78449 - DNA, 40 bp, Homo sapiens
cctcaggctcccaagcagctgatactacaggcacacacac

SEQ ID NO: 78450 - DNA, 40 bp, Homo sapiens
tgtgtgtgcctgtagtatcagctgcttgggagcctgaggc

SEQ ID NO: 78451 - DNA, 40 bp, Homo sapiens
gcctcaggctcccaagcagctgatactacaggcacacaca

SEQ ID NO: 78452 - DNA, 40 bp, Homo sapiens
gtgtgtgcctgtagtatcagctgcttgggagcctgaggca

SEQ ID NO: 78453 - DNA, 40 bp, Homo sapiens
tgcctcaggctcccaagcagctgatactacaggcacacac

SEQ ID NO: 78454 - DNA, 40 bp, Homo sapiens
tgtgtgcctgtagtatcagctgcttgggagcctgaggcag

SEQ ID NO: 78455 - DNA, 40 bp, Homo sapiens
ctgcctcaggctcccaagcagctgatactacaggcacaca

SEQ ID NO: 78456 - DNA, 40 bp, Homo sapiens
gtgtgcctgtagtatcagctgcttgggagcctgaggcagg

SEQ ID NO: 78457 - DNA, 40 bp, Homo sapiens
cctgcctcaggctcccaagcagctgatactacaggcacac

SEQ ID NO: 78458 - DNA, 40 bp, Homo sapiens
tgtgcctgtagtatcagctgcttgggagcctgaggcagga

SEQ ID NO: 78459 - DNA, 40 bp, Homo sapiens
tcctgcctcaggctcccaagcagctgatactacaggcaca

SEQ ID NO: 78460 - DNA, 40 bp, Homo sapiens
gtgcctgtagtatcagctgcttgggagcctgaggcaggag

SEQ ID NO: 78461 - DNA, 40 bp, Homo sapiens
ctcctgcctcaggctcccaagcagctgatactacaggcac

SEQ ID NO: 78462 - DNA, 40 bp, Homo sapiens
tgcctgtagtatcagctgcttgggagcctgaggcaggagg

SEQ ID NO: 78463 - DNA, 40 bp, Homo sapiens
cctcctgcctcaggctcccaagcagctgatactacaggca

SEQ ID NO: 78464 - DNA, 40 bp, Homo sapiens
gcctgtagtatcagctgcttgggagcctgaggcaggagga

SEQ ID NO: 78465 - DNA, 40 bp, Homo sapiens
tcctcctgcctcaggctcccaagcagctgatactacaggc

SEQ ID NO: 78466 - DNA, 40 bp, Homo sapiens
cctgtagtatcagctgcttgggagcctgaggcaggaggat

SEQ ID NO: 78467 - DNA, 40 bp, Homo sapiens
atcctcctgcctcaggctcccaagcagctgatactacagg

SEQ ID NO: 78468 - DNA, 40 bp, Homo sapiens
ctgtagtatcagctgcttgggagcctgaggcaggaggatt

SEQ ID NO: 78469 - DNA, 40 bp, Homo sapiens
aatcctcctgcctcaggctcccaagcagctgatactacag

SEQ ID NO: 78470 - DNA, 40 bp, Homo sapiens
tgtagtatcagctgcttgggagcctgaggcaggaggattg

SEQ ID NO: 78471 - DNA, 40 bp, Homo sapiens
caatcctcctgcctcaggctcccaagcagctgatactaca

SEQ ID NO: 78472 - DNA, 40 bp, Homo sapiens
gtagtatcagctgcttgggagcctgaggcaggaggattgc

SEQ ID NO: 78473 - DNA, 40 bp, Homo sapiens
gcaatcctcctgcctcaggctcccaagcagctgatactac

SEQ ID NO: 78474 - DNA, 40 bp, Homo sapiens
tagtatcagctgcttgggagcctgaggcaggaggattgcc

SEQ ID NO: 78475 - DNA, 40 bp, Homo sapiens
ggcaatcctcctgcctcaggctcccaagcagctgatacta

SEQ ID NO: 78476 - DNA, 40 bp, Homo sapiens
agtatcagctgcttgggagcctgaggcaggaggattgcct

SEQ ID NO: 78477 - DNA, 40 bp, Homo sapiens
aggcaatcctcctgcctcaggctcccaagcagctgatact

SEQ ID NO: 78478 - DNA, 40 bp, Homo sapiens
gtatcagctgcttgggagcctgaggcaggaggattgcctg

SEQ ID NO: 78479 - DNA, 40 bp, Homo sapiens
caggcaatcctcctgcctcaggctcccaagcagctgatac

SEQ ID NO: 78480 - DNA, 40 bp, Homo sapiens
tatcagctgcttgggagcctgaggcaggaggattgcctga

SEQ ID NO: 78481 - DNA, 40 bp, Homo sapiens
tcaggcaatcctcctgcctcaggctcccaagcagctgata

SEQ ID NO: 78482 - DNA, 40 bp, Homo sapiens
atcagctgcttgggagcctgaggcaggaggattgcctgac

SEQ ID NO: 78483 - DNA, 40 bp, Homo sapiens
gtcaggcaatcctcctgcctcaggctcccaagcagctgat

SEQ ID NO: 78484 - DNA, 40 bp, Homo sapiens
tcagctgcttgggagcctgaggcaggaggattgcctgacc

SEQ ID NO: 78485 - DNA, 40 bp, Homo sapiens
ggtcaggcaatcctcctgcctcaggctcccaagcagctga

SEQ ID NO: 78486 - DNA, 40 bp, Homo sapiens
cagctgcttgggagcctgaggcaggaggattgcctgaccc

SEQ ID NO: 78487 - DNA, 40 bp, Homo sapiens
gggtcaggcaatcctcctgcctcaggctcccaagcagctg

SEQ ID NO: 78488 - DNA, 40 bp, Homo sapiens
agctgcttgggagcctgaggcaggaggattgcctgacccc

SEQ ID NO: 78489 - DNA, 40 bp, Homo sapiens
ggggtcaggcaatcctcctgcctcaggctcccaagcagct

SEQ ID NO: 78490 - DNA, 40 bp, Homo sapiens
gctgcttgggagcctgaggcaggaggattgcctgacccca

SEQ ID NO: 78491 - DNA, 40 bp, Homo sapiens
tggggtcaggcaatcctcctgcctcaggctcccaagcagc

SEQ ID NO: 78492 - DNA, 40 bp, Homo sapiens
ctgcttgggagcctgaggcaggaggattgcctgaccccag

SEQ ID NO: 78493 - DNA, 40 bp, Homo sapiens
ctggggtcaggcaatcctcctgcctcaggctcccaagcag

SEQ ID NO: 78494 - DNA, 40 bp, Homo sapiens
tgcttgggagcctgaggcaggaggattgcctgaccccagg

SEQ ID NO: 78495 - DNA, 40 bp, Homo sapiens
cctggggtcaggcaatcctcctgcctcaggctcccaagca

SEQ ID NO: 78496 - DNA, 40 bp, Homo sapiens
gcttgggagcctgaggcaggaggattgcctgaccccagga

SEQ ID NO: 78497 - DNA, 40 bp, Homo sapiens
tcctggggtcaggcaatcctcctgcctcaggctcccaagc

SEQ ID NO: 78498 - DNA, 40 bp, Homo sapiens
cttgggagcctgaggcaggaggattgcctgaccccaggag

SEQ ID NO: 78499 - DNA, 40 bp, Homo sapiens
ctcctggggtcaggcaatcctcctgcctcaggctcccaag

SEQ ID NO: 78500 - DNA, 40 bp, Homo sapiens
ttgggagcctgaggcaggaggattgcctgaccccaggagt

SEQ ID NO: 78501 - DNA, 40 bp, Homo sapiens
actcctggggtcaggcaatcctcctgcctcaggctcccaa

SEQ ID NO: 78502 - DNA, 40 bp, Homo sapiens
tgggagcctgaggcaggaggattgcctgaccccaggagtt

SEQ ID NO: 78503 - DNA, 40 bp, Homo sapiens
aactcctggggtcaggcaatcctcctgcctcaggctccca

SEQ ID NO: 78504 - DNA, 40 bp, Homo sapiens
gggagcctgaggcaggaggattgcctgaccccaggagttt

SEQ ID NO: 78505 - DNA, 40 bp, Homo sapiens
aaactcctggggtcaggcaatcctcctgcctcaggctccc

SEQ ID NO: 78506 - DNA, 40 bp, Homo sapiens
ggagcctgaggcaggaggattgcctgaccccaggagtttg

SEQ ID NO: 78507 - DNA, 40 bp, Homo sapiens
caaactcctggggtcaggcaatcctcctgcctcaggctcc

SEQ ID NO: 78508 - DNA, 40 bp, Homo sapiens
gagcctgaggcaggaggattgcctgaccccaggagtttga

SEQ ID NO: 78509 - DNA, 40 bp, Homo sapiens
tcaaactcctggggtcaggcaatcctcctgcctcaggctc

SEQ ID NO: 78510 - DNA, 40 bp, Homo sapiens
agcctgaggcaggaggattgcctgaccccaggagtttgag

SEQ ID NO: 78511 - DNA, 40 bp, Homo sapiens
ctcaaactcctggggtcaggcaatcctcctgcctcaggct

SEQ ID NO: 78512 - DNA, 40 bp, Homo sapiens
gcctgaggcaggaggattgcctgaccccaggagtttgagg

SEQ ID NO: 78513 - DNA, 40 bp, Homo sapiens
cctcaaactcctggggtcaggcaatcctcctgcctcaggc

SEQ ID NO: 78514 - DNA, 40 bp, Homo sapiens
cctgaggcaggaggattgcctgaccccaggagtttgaggt

SEQ ID NO: 78515 - DNA, 40 bp, Homo sapiens
acctcaaactcctggggtcaggcaatcctcctgcctcagg

SEQ ID NO: 78516 - DNA, 40 bp, Homo sapiens
ctgaggcaggaggattgcctgaccccaggagtttgaggtt

SEQ ID NO: 78517 - DNA, 40 bp, Homo sapiens
aacctcaaactcctggggtcaggcaatcctcctgcctcag

SEQ ID NO: 78518 - DNA, 40 bp, Homo sapiens
tgaggcaggaggattgcctgaccccaggagtttgaggttg

SEQ ID NO: 78519 - DNA, 40 bp, Homo sapiens
caacctcaaactcctggggtcaggcaatcctcctgcctca

SEQ ID NO: 78520 - DNA, 40 bp, Homo sapiens
gaggcaggaggattgcctgaccccaggagtttgaggttga

SEQ ID NO: 78521 - DNA, 40 bp, Homo sapiens
tcaacctcaaactcctggggtcaggcaatcctcctgcctc

SEQ ID NO: 78522 - DNA, 40 bp, Homo sapiens
aggcaggaggattgcctgaccccaggagtttgaggttgaa

SEQ ID NO: 78523 - DNA, 40 bp, Homo sapiens
ttcaacctcaaactcctggggtcaggcaatcctcctgcct

SEQ ID NO: 78524 - DNA, 40 bp, Homo sapiens
ggcaggaggattgcctgaccccaggagtttgaggttgaag

SEQ ID NO: 78525 - DNA, 40 bp, Homo sapiens
cttcaacctcaaactcctggggtcaggcaatcctcctgcc

SEQ ID NO: 78526 - DNA, 40 bp, Homo sapiens
gcaggaggattgcctgaccccaggagtttgaggttgaagg

SEQ ID NO: 78527 - DNA, 40 bp, Homo sapiens
ccttcaacctcaaactcctggggtcaggcaatcctcctgc

SEQ ID NO: 78528 - DNA, 40 bp, Homo sapiens
caggaggattgcctgaccccaggagtttgaggttgaaggg

SEQ ID NO: 78529 - DNA, 40 bp, Homo sapiens
cccttcaacctcaaactcctggggtcaggcaatcctcctg

SEQ ID NO: 78530 - DNA, 40 bp, Homo sapiens
aggaggattgcctgaccccaggagtttgaggttgaaggga

SEQ ID NO: 78531 - DNA, 40 bp, Homo sapiens
tcccttcaacctcaaactcctggggtcaggcaatcctcct

SEQ ID NO: 78532 - DNA, 40 bp, Homo sapiens
ggaggattgcctgaccccaggagtttgaggttgaagggag

SEQ ID NO: 78533 - DNA, 40 bp, Homo sapiens
ctcccttcaacctcaaactcctggggtcaggcaatcctcc

SEQ ID NO: 78534 - DNA, 40 bp, Homo sapiens
gaggattgcctgaccccaggagtttgaggttgaagggagc

SEQ ID NO: 78535 - DNA, 40 bp, Homo sapiens
gctcccttcaacctcaaactcctggggtcaggcaatcctc

SEQ ID NO: 78536 - DNA, 40 bp, Homo sapiens
aggattgcctgaccccaggagtttgaggttgaagggagct

SEQ ID NO: 78537 - DNA, 40 bp, Homo sapiens
agctcccttcaacctcaaactcctggggtcaggcaatcct

SEQ ID NO: 78538 - DNA, 40 bp, Homo sapiens
ggattgcctgaccccaggagtttgaggttgaagggagcta

SEQ ID NO: 78539 - DNA, 40 bp, Homo sapiens
tagctcccttcaacctcaaactcctggggtcaggcaatcc

SEQ ID NO: 78540 - DNA, 40 bp, Homo sapiens
gattgcctgaccccaggagtttgaggttgaagggagctat

SEQ ID NO: 78541 - DNA, 40 bp, Homo sapiens
atagctcccttcaacctcaaactcctggggtcaggcaatc

SEQ ID NO: 78542 - DNA, 40 bp, Homo sapiens
attgcctgaccccaggagtttgaggttgaagggagctatg

SEQ ID NO: 78543 - DNA, 40 bp, Homo sapiens
catagctcccttcaacctcaaactcctggggtcaggcaat

SEQ ID NO: 78544 - DNA, 40 bp, Homo sapiens
ttgcctgaccccaggagtttgaggttgaagggagctatga

SEQ ID NO: 78545 - DNA, 40 bp, Homo sapiens
tcatagctcccttcaacctcaaactcctggggtcaggcaa

SEQ ID NO: 78546 - DNA, 40 bp, Homo sapiens
tgcctgaccccaggagtttgaggttgaagggagctatgat

SEQ ID NO: 78547 - DNA, 40 bp, Homo sapiens
atcatagctcccttcaacctcaaactcctggggtcaggca

SEQ ID NO: 78548 - DNA, 40 bp, Homo sapiens
gcctgaccccaggagtttgaggttgaagggagctatgatg

SEQ ID NO: 78549 - DNA, 40 bp, Homo sapiens
catcatagctcccttcaacctcaaactcctggggtcaggc

SEQ ID NO: 78550 - DNA, 40 bp, Homo sapiens
cctgaccccaggagtttgaggttgaagggagctatgatgg

SEQ ID NO: 78551 - DNA, 40 bp, Homo sapiens
ccatcatagctcccttcaacctcaaactcctggggtcagg

SEQ ID NO: 78552 - DNA, 40 bp, Homo sapiens
ctgaccccaggagtttgaggttgaagggagctatgatggt

SEQ ID NO: 78553 - DNA, 40 bp, Homo sapiens
accatcatagctcccttcaacctcaaactcctggggtcag

SEQ ID NO: 78554 - DNA, 40 bp, Homo sapiens
tgaccccaggagtttgaggttgaagggagctatgatggtg

SEQ ID NO: 78555 - DNA, 40 bp, Homo sapiens
caccatcatagctcccttcaacctcaaactcctggggtca

SEQ ID NO: 78556 - DNA, 40 bp, Homo sapiens
gaccccaggagtttgaggttgaagggagctatgatggtgc

SEQ ID NO: 78557 - DNA, 40 bp, Homo sapiens
gcaccatcatagctcccttcaacctcaaactcctggggtc

SEQ ID NO: 78558 - DNA, 40 bp, Homo sapiens
accccaggagtttgaggttgaagggagctatgatggtgcc

SEQ ID NO: 78559 - DNA, 40 bp, Homo sapiens
ggcaccatcatagctcccttcaacctcaaactcctggggt

SEQ ID NO: 78560 - DNA, 40 bp, Homo sapiens
ccccaggagtttgaggttgaagggagctatgatggtgcca

SEQ ID NO: 78561 - DNA, 40 bp, Homo sapiens
tggcaccatcatagctcccttcaacctcaaactcctgggg

SEQ ID NO: 78562 - DNA, 40 bp, Homo sapiens
cccaggagtttgaggttgaagggagctatgatggtgccat

SEQ ID NO: 78563 - DNA, 40 bp, Homo sapiens
atggcaccatcatagctcccttcaacctcaaactcctggg

SEQ ID NO: 78564 - DNA, 40 bp, Homo sapiens
ccaggagtttgaggttgaagggagctatgatggtgccatg

SEQ ID NO: 78565 - DNA, 40 bp, Homo sapiens
catggcaccatcatagctcccttcaacctcaaactcctgg

SEQ ID NO: 78566 - DNA, 40 bp, Homo sapiens
caggagtttgaggttgaagggagctatgatggtgccatgg

SEQ ID NO: 78567 - DNA, 40 bp, Homo sapiens
ccatggcaccatcatagctcccttcaacctcaaactcctg

SEQ ID NO: 78568 - DNA, 40 bp, Homo sapiens
aggagtttgaggttgaagggagctatgatggtgccatggc

SEQ ID NO: 78569 - DNA, 40 bp, Homo sapiens
gccatggcaccatcatagctcccttcaacctcaaactcct

SEQ ID NO: 78570 - DNA, 40 bp, Homo sapiens
ggagtttgaggttgaagggagctatgatggtgccatggca

SEQ ID NO: 78571 - DNA, 40 bp, Homo sapiens
tgccatggcaccatcatagctcccttcaacctcaaactcc

SEQ ID NO: 78572 - DNA, 40 bp, Homo sapiens
gagtttgaggttgaagggagctatgatggtgccatggcac

SEQ ID NO: 78573 - DNA, 40 bp, Homo sapiens
gtgccatggcaccatcatagctcccttcaacctcaaactc

SEQ ID NO: 78574 - DNA, 40 bp, Homo sapiens
agtttgaggttgaagggagctatgatggtgccatggcact

SEQ ID NO: 78575 - DNA, 40 bp, Homo sapiens
agtgccatggcaccatcatagctcccttcaacctcaaact

SEQ ID NO: 78576 - DNA, 40 bp, Homo sapiens
gtttgaggttgaagggagctatgatggtgccatggcactg

SEQ ID NO: 78577 - DNA, 40 bp, Homo sapiens
cagtgccatggcaccatcatagctcccttcaacctcaaac

SEQ ID NO: 78578 - DNA, 40 bp, Homo sapiens
tttgaggttgaagggagctatgatggtgccatggcactgt

SEQ ID NO: 78579 - DNA, 40 bp, Homo sapiens
acagtgccatggcaccatcatagctcccttcaacctcaaa

SEQ ID NO: 78580 - DNA, 40 bp, Homo sapiens
ttgaggttgaagggagctatgatggtgccatggcactgta

SEQ ID NO: 78581 - DNA, 40 bp, Homo sapiens
tacagtgccatggcaccatcatagctcccttcaacctcaa

SEQ ID NO: 78582 - DNA, 40 bp, Homo sapiens
tgaggttgaagggagctatgatggtgccatggcactgtag

SEQ ID NO: 78583 - DNA, 40 bp, Homo sapiens
ctacagtgccatggcaccatcatagctcccttcaacctca

SEQ ID NO: 78584 - DNA, 40 bp, Homo sapiens
gaggttgaagggagctatgatggtgccatggcactgtagc

SEQ ID NO: 78585 - DNA, 40 bp, Homo sapiens
gctacagtgccatggcaccatcatagctcccttcaacctc

SEQ ID NO: 78586 - DNA, 40 bp, Homo sapiens
aggttgaagggagctatgatggtgccatggcactgtagcc

SEQ ID NO: 78587 - DNA, 40 bp, Homo sapiens
ggctacagtgccatggcaccatcatagctcccttcaacct

SEQ ID NO: 78588 - DNA, 40 bp, Homo sapiens
ggttgaagggagctatgatggtgccatggcactgtagcct

SEQ ID NO: 78589 - DNA, 40 bp, Homo sapiens
aggctacagtgccatggcaccatcatagctcccttcaacc

SEQ ID NO: 78590 - DNA, 40 bp, Homo sapiens
gttgaagggagctatgatggtgccatggcactgtagccta

SEQ ID NO: 78591 - DNA, 40 bp, Homo sapiens
taggctacagtgccatggcaccatcatagctcccttcaac

SEQ ID NO: 78592 - DNA, 40 bp, Homo sapiens
ttgaagggagctatgatggtgccatggcactgtagcctag

SEQ ID NO: 78593 - DNA, 40 bp, Homo sapiens
ctaggctacagtgccatggcaccatcatagctcccttcaa

SEQ ID NO: 78594 - DNA, 40 bp, Homo sapiens
tgaagggagctatgatggtgccatggcactgtagcctagg

SEQ ID NO: 78595 - DNA, 40 bp, Homo sapiens
cctaggctacagtgccatggcaccatcatagctcccttca

SEQ ID NO: 78596 - DNA, 40 bp, Homo sapiens
gaagggagctatgatggtgccatggcactgtagcctaggc

SEQ ID NO: 78597 - DNA, 40 bp, Homo sapiens
gcctaggctacagtgccatggcaccatcatagctcccttc

SEQ ID NO: 78598 - DNA, 40 bp, Homo sapiens
aagggagctatgatggtgccatggcactgtagcctaggca

SEQ ID NO: 78599 - DNA, 40 bp, Homo sapiens
tgcctaggctacagtgccatggcaccatcatagctccctt

SEQ ID NO: 78600 - DNA, 40 bp, Homo sapiens
agggagctatgatggtgccatggcactgtagcctaggcaa

SEQ ID NO: 78601 - DNA, 40 bp, Homo sapiens
ttgcctaggctacagtgccatggcaccatcatagctccct

SEQ ID NO: 78602 - DNA, 40 bp, Homo sapiens
gggagctatgatggtgccatggcactgtagcctaggcaac

SEQ ID NO: 78603 - DNA, 40 bp, Homo sapiens
gttgcctaggctacagtgccatggcaccatcatagctccc

SEQ ID NO: 78604 - DNA, 40 bp, Homo sapiens
ggagctatgatggtgccatggcactgtagcctaggcaaca

SEQ ID NO: 78605 - DNA, 40 bp, Homo sapiens
tgttgcctaggctacagtgccatggcaccatcatagctcc

SEQ ID NO: 78606 - DNA, 40 bp, Homo sapiens
gagctatgatggtgccatggcactgtagcctaggcaacag

SEQ ID NO: 78607 - DNA, 40 bp, Homo sapiens
ctgttgcctaggctacagtgccatggcaccatcatagctc

SEQ ID NO: 78608 - DNA, 40 bp, Homo sapiens
agctatgatggtgccatggcactgtagcctaggcaacaga

SEQ ID NO: 78609 - DNA, 40 bp, Homo sapiens
tctgttgcctaggctacagtgccatggcaccatcatagct

SEQ ID NO: 78610 - DNA, 40 bp, Homo sapiens
gctatgatggtgccatggcactgtagcctaggcaacagaa

SEQ ID NO: 78611 - DNA, 40 bp, Homo sapiens
ttctgttgcctaggctacagtgccatggcaccatcatagc

SEQ ID NO: 78612 - DNA, 40 bp, Homo sapiens
ctatgatggtgccatggcactgtagcctaggcaacagaaa

SEQ ID NO: 78613 - DNA, 40 bp, Homo sapiens
tttctgttgcctaggctacagtgccatggcaccatcatag

SEQ ID NO: 78614 - DNA, 40 bp, Homo sapiens
tatgatggtgccatggcactgtagcctaggcaacagaaag

SEQ ID NO: 78615 - DNA, 40 bp, Homo sapiens
ctttctgttgcctaggctacagtgccatggcaccatcata

SEQ ID NO: 78616 - DNA, 40 bp, Homo sapiens
atgatggtgccatggcactgtagcctaggcaacagaaaga

SEQ ID NO: 78617 - DNA, 40 bp, Homo sapiens
tctttctgttgcctaggctacagtgccatggcaccatcat

SEQ ID NO: 78618 - DNA, 40 bp, Homo sapiens
tgatggtgccatggcactgtagcctaggcaacagaaagag

SEQ ID NO: 78619 - DNA, 40 bp, Homo sapiens
ctctttctgttgcctaggctacagtgccatggcaccatca

SEQ ID NO: 78620 - DNA, 40 bp, Homo sapiens
gatggtgccatggcactgtagcctaggcaacagaaagaga

SEQ ID NO: 78621 - DNA, 40 bp, Homo sapiens
tctctttctgttgcctaggctacagtgccatggcaccatc

SEQ ID NO: 78622 - DNA, 40 bp, Homo sapiens
atggtgccatggcactgtagcctaggcaacagaaagagac

SEQ ID NO: 78623 - DNA, 40 bp, Homo sapiens
gtctctttctgttgcctaggctacagtgccatggcaccat

SEQ ID NO: 78624 - DNA, 40 bp, Homo sapiens
tggtgccatggcactgtagcctaggcaacagaaagagact

SEQ ID NO: 78625 - DNA, 40 bp, Homo sapiens
agtctctttctgttgcctaggctacagtgccatggcacca

SEQ ID NO: 78626 - DNA, 40 bp, Homo sapiens
ggtgccatggcactgtagcctaggcaacagaaagagactc

SEQ ID NO: 78627 - DNA, 40 bp, Homo sapiens
gagtctctttctgttgcctaggctacagtgccatggcacc

SEQ ID NO: 78628 - DNA, 40 bp, Homo sapiens
gtgccatggcactgtagcctaggcaacagaaagagactcc

SEQ ID NO: 78629 - DNA, 40 bp, Homo sapiens
ggagtctctttctgttgcctaggctacagtgccatggcac

SEQ ID NO: 78630 - DNA, 40 bp, Homo sapiens
tgccatggcactgtagcctaggcaacagaaagagactcca

SEQ ID NO: 78631 - DNA, 40 bp, Homo sapiens
tggagtctctttctgttgcctaggctacagtgccatggca

SEQ ID NO: 78632 - DNA, 40 bp, Homo sapiens
gccatggcactgtagcctaggcaacagaaagagactccat

SEQ ID NO: 78633 - DNA, 40 bp, Homo sapiens
atggagtctctttctgttgcctaggctacagtgccatggc

SEQ ID NO: 78634 - DNA, 40 bp, Homo sapiens
ccatggcactgtagcctaggcaacagaaagagactccatc

SEQ ID NO: 78635 - DNA, 40 bp, Homo sapiens
gatggagtctctttctgttgcctaggctacagtgccatgg

SEQ ID NO: 78636 - DNA, 40 bp, Homo sapiens
catggcactgtagcctaggcaacagaaagagactccatct

SEQ ID NO: 78637 - DNA, 40 bp, Homo sapiens
agatggagtctctttctgttgcctaggctacagtgccatg

SEQ ID NO: 78638 - DNA, 40 bp, Homo sapiens
atggcactgtagcctaggcaacagaaagagactccatctc

SEQ ID NO: 78639 - DNA, 40 bp, Homo sapiens
gagatggagtctctttctgttgcctaggctacagtgccat

SEQ ID NO: 78640 - DNA, 40 bp, Homo sapiens
tggcactgtagcctaggcaacagaaagagactccatctct

SEQ ID NO: 78641 - DNA, 40 bp, Homo sapiens
agagatggagtctctttctgttgcctaggctacagtgcca

SEQ ID NO: 78642 - DNA, 40 bp, Homo sapiens
ggcactgtagcctaggcaacagaaagagactccatctctt

SEQ ID NO: 78643 - DNA, 40 bp, Homo sapiens
aagagatggagtctctttctgttgcctaggctacagtgcc

SEQ ID NO: 78644 - DNA, 40 bp, Homo sapiens
gcactgtagcctaggcaacagaaagagactccatctctta

SEQ ID NO: 78645 - DNA, 40 bp, Homo sapiens
taagagatggagtctctttctgttgcctaggctacagtgc

SEQ ID NO: 78646 - DNA, 40 bp, Homo sapiens
cactgtagcctaggcaacagaaagagactccatctcttaa

SEQ ID NO: 78647 - DNA, 40 bp, Homo sapiens
ttaagagatggagtctctttctgttgcctaggctacagtg

SEQ ID NO: 78648 - DNA, 40 bp, Homo sapiens
actgtagcctaggcaacagaaagagactccatctcttaaa

SEQ ID NO: 78649 - DNA, 40 bp, Homo sapiens
tttaagagatggagtctctttctgttgcctaggctacagt

SEQ ID NO: 78650 - DNA, 40 bp, Homo sapiens
ctgtagcctaggcaacagaaagagactccatctcttaaaa

SEQ ID NO: 78651 - DNA, 40 bp, Homo sapiens
ttttaagagatggagtctctttctgttgcctaggctacag

SEQ ID NO: 78652 - DNA, 40 bp, Homo sapiens
tgtagcctaggcaacagaaagagactccatctcttaaaaa

SEQ ID NO: 78653 - DNA, 40 bp, Homo sapiens
tttttaagagatggagtctctttctgttgcctaggctaca

SEQ ID NO: 78654 - DNA, 40 bp, Homo sapiens
gtagcctaggcaacagaaagagactccatctcttaaaaaa

SEQ ID NO: 78655 - DNA, 40 bp, Homo sapiens
ttttttaagagatggagtctctttctgttgcctaggctac

SEQ ID NO: 78656 - DNA, 40 bp, Homo sapiens
tagcctaggcaacagaaagagactccatctcttaaaaaaa

SEQ ID NO: 78657 - DNA, 40 bp, Homo sapiens
tttttttaagagatggagtctctttctgttgcctaggcta

SEQ ID NO: 78658 - DNA, 40 bp, Homo sapiens
agcctaggcaacagaaagagactccatctcttaaaaaaag

SEQ ID NO: 78659 - DNA, 40 bp, Homo sapiens
ctttttttaagagatggagtctctttctgttgcctaggct

SEQ ID NO: 78660 - DNA, 40 bp, Homo sapiens
gcctaggcaacagaaagagactccatctcttaaaaaaagt

SEQ ID NO: 78661 - DNA, 40 bp, Homo sapiens
actttttttaagagatggagtctctttctgttgcctaggc

SEQ ID NO: 78662 - DNA, 40 bp, Homo sapiens
cctaggcaacagaaagagactccatctcttaaaaaaagta

SEQ ID NO: 78663 - DNA, 40 bp, Homo sapiens
tactttttttaagagatggagtctctttctgttgcctagg

SEQ ID NO: 78664 - DNA, 40 bp, Homo sapiens
ctaggcaacagaaagagactccatctcttaaaaaaagtaa

SEQ ID NO: 78665 - DNA, 40 bp, Homo sapiens
ttactttttttaagagatggagtctctttctgttgcctag

SEQ ID NO: 78666 - DNA, 40 bp, Homo sapiens
taggcaacagaaagagactccatctcttaaaaaaagtaaa

SEQ ID NO: 78667 - DNA, 40 bp, Homo sapiens
tttactttttttaagagatggagtctctttctgttgccta

SEQ ID NO: 78668 - DNA, 40 bp, Homo sapiens
aggcaacagaaagagactccatctcttaaaaaaagtaaaa

SEQ ID NO: 78669 - DNA, 40 bp, Homo sapiens
ttttactttttttaagagatggagtctctttctgttgcct

SEQ ID NO: 78670 - DNA, 40 bp, Homo sapiens
ggcaacagaaagagactccatctcttaaaaaaagtaaaaa

SEQ ID NO: 78671 - DNA, 40 bp, Homo sapiens
tttttactttttttaagagatggagtctctttctgttgcc

SEQ ID NO: 78672 - DNA, 40 bp, Homo sapiens
gcaacagaaagagactccatctcttaaaaaaagtaaaaat

SEQ ID NO: 78673 - DNA, 40 bp, Homo sapiens
atttttactttttttaagagatggagtctctttctgttgc

SEQ ID NO: 78674 - DNA, 40 bp, Homo sapiens
caacagaaagagactccatctcttaaaaaaagtaaaaata

SEQ ID NO: 78675 - DNA, 40 bp, Homo sapiens
tatttttactttttttaagagatggagtctctttctgttg

SEQ ID NO: 78676 - DNA, 40 bp, Homo sapiens
aacagaaagagactccatctcttaaaaaaagtaaaaataa

SEQ ID NO: 78677 - DNA, 40 bp, Homo sapiens
ttatttttactttttttaagagatggagtctctttctgtt

SEQ ID NO: 78678 - DNA, 40 bp, Homo sapiens
acagaaagagactccatctcttaaaaaaagtaaaaataaa

SEQ ID NO: 78679 - DNA, 40 bp, Homo sapiens
tttatttttactttttttaagagatggagtctctttctgt

SEQ ID NO: 78680 - DNA, 40 bp, Homo sapiens
cagaaagagactccatctcttaaaaaaagtaaaaataaaa

SEQ ID NO: 78681 - DNA, 40 bp, Homo sapiens
ttttatttttactttttttaagagatggagtctctttctg

SEQ ID NO: 78682 - DNA, 40 bp, Homo sapiens
agaaagagactccatctcttaaaaaaagtaaaaataaaaa

SEQ ID NO: 78683 - DNA, 40 bp, Homo sapiens
tttttatttttactttttttaagagatggagtctctttct

SEQ ID NO: 78684 - DNA, 40 bp, Homo sapiens
gaaagagactccatctcttaaaaaaagtaaaaataaaaaa

SEQ ID NO: 78685 - DNA, 40 bp, Homo sapiens
ttttttatttttactttttttaagagatggagtctctttc

SEQ ID NO: 78686 - DNA, 40 bp, Homo sapiens
aaagagactccatctcttaaaaaaagtaaaaataaaaaaa

SEQ ID NO: 78687 - DNA, 40 bp, Homo sapiens
tttttttatttttactttttttaagagatggagtctcttt

SEQ ID NO: 78688 - DNA, 40 bp, Homo sapiens
aagagactccatctcttaaaaaaagtaaaaataaaaaaat

SEQ ID NO: 78689 - DNA, 40 bp, Homo sapiens
atttttttatttttactttttttaagagatggagtctctt

SEQ ID NO: 78690 - DNA, 40 bp, Homo sapiens
agagactccatctcttaaaaaaagtaaaaataaaaaaatt

SEQ ID NO: 78691 - DNA, 40 bp, Homo sapiens
aatttttttatttttactttttttaagagatggagtctct

SEQ ID NO: 78692 - DNA, 40 bp, Homo sapiens
gagactccatctcttaaaaaaagtaaaaataaaaaaattt

SEQ ID NO: 78693 - DNA, 40 bp, Homo sapiens
aaatttttttatttttactttttttaagagatggagtctc

SEQ ID NO: 78694 - DNA, 40 bp, Homo sapiens
agactccatctcttaaaaaaagtaaaaataaaaaaatttt

SEQ ID NO: 78695 - DNA, 40 bp, Homo sapiens
aaaatttttttatttttactttttttaagagatggagtct

SEQ ID NO: 78696 - DNA, 40 bp, Homo sapiens
gactccatctcttaaaaaaagtaaaaataaaaaaattttg

SEQ ID NO: 78697 - DNA, 40 bp, Homo sapiens
caaaatttttttatttttactttttttaagagatggagtc

SEQ ID NO: 78698 - DNA, 40 bp, Homo sapiens
actccatctcttaaaaaaagtaaaaataaaaaaattttgg

SEQ ID NO: 78699 - DNA, 40 bp, Homo sapiens
ccaaaatttttttatttttactttttttaagagatggagt

SEQ ID NO: 78700 - DNA, 40 bp, Homo sapiens
ctccatctcttaaaaaaagtaaaaataaaaaaattttggc

SEQ ID NO: 78701 - DNA, 40 bp, Homo sapiens
gccaaaatttttttatttttactttttttaagagatggag

SEQ ID NO: 78702 - DNA, 40 bp, Homo sapiens
tccatctcttaaaaaaagtaaaaataaaaaaattttggca

SEQ ID NO: 78703 - DNA, 40 bp, Homo sapiens
tgccaaaatttttttatttttactttttttaagagatgga

SEQ ID NO: 78704 - DNA, 40 bp, Homo sapiens
ccatctcttaaaaaaagtaaaaataaaaaaattttggcac

SEQ ID NO: 78705 - DNA, 40 bp, Homo sapiens
gtgccaaaatttttttatttttactttttttaagagatgg

SEQ ID NO: 78706 - DNA, 40 bp, Homo sapiens
catctcttaaaaaaagtaaaaataaaaaaattttggcaca

SEQ ID NO: 78707 - DNA, 40 bp, Homo sapiens
tgtgccaaaatttttttatttttactttttttaagagatg

SEQ ID NO: 78708 - DNA, 40 bp, Homo sapiens
atctcttaaaaaaagtaaaaataaaaaaattttggcacag

SEQ ID NO: 78709 - DNA, 40 bp, Homo sapiens
ctgtgccaaaatttttttatttttactttttttaagagat

SEQ ID NO: 78710 - DNA, 40 bp, Homo sapiens
tctcttaaaaaaagtaaaaataaaaaaattttggcacagg

SEQ ID NO: 78711 - DNA, 40 bp, Homo sapiens
cctgtgccaaaatttttttatttttactttttttaagaga

SEQ ID NO: 78712 - DNA, 40 bp, Homo sapiens
ctcttaaaaaaagtaaaaataaaaaaattttggcacaggg

SEQ ID NO: 78713 - DNA, 40 bp, Homo sapiens
ccctgtgccaaaatttttttatttttactttttttaagag

SEQ ID NO: 78714 - DNA, 40 bp, Homo sapiens
tcttaaaaaaagtaaaaataaaaaaattttggcacaggga

SEQ ID NO: 78715 - DNA, 40 bp, Homo sapiens
tccctgtgccaaaatttttttatttttactttttttaaga

SEQ ID NO: 78716 - DNA, 40 bp, Homo sapiens
cttaaaaaaagtaaaaataaaaaaattttggcacagggac

SEQ ID NO: 78717 - DNA, 40 bp, Homo sapiens
gtccctgtgccaaaatttttttatttttactttttttaag

SEQ ID NO: 78718 - DNA, 40 bp, Homo sapiens
ttaaaaaaagtaaaaataaaaaaattttggcacagggaca

SEQ ID NO: 78719 - DNA, 40 bp, Homo sapiens
tgtccctgtgccaaaatttttttatttttactttttttaa

SEQ ID NO: 78720 - DNA, 40 bp, Homo sapiens
taaaaaaagtaaaaataaaaaaattttggcacagggacag

SEQ ID NO: 78721 - DNA, 40 bp, Homo sapiens
ctgtccctgtgccaaaatttttttatttttacttttttta

SEQ ID NO: 78722 - DNA, 40 bp, Homo sapiens
aaaaaaagtaaaaataaaaaaattttggcacagggacagt

SEQ ID NO: 78723 - DNA, 40 bp, Homo sapiens
actgtccctgtgccaaaatttttttatttttacttttttt

SEQ ID NO: 78724 - DNA, 40 bp, Homo sapiens
aaaaaagtaaaaataaaaaaattttggcacagggacagtg

SEQ ID NO: 78725 - DNA, 40 bp, Homo sapiens
cactgtccctgtgccaaaatttttttatttttactttttt

SEQ ID NO: 78726 - DNA, 40 bp, Homo sapiens
aaaaagtaaaaataaaaaaattttggcacagggacagtgg

SEQ ID NO: 78727 - DNA, 40 bp, Homo sapiens
ccactgtccctgtgccaaaatttttttatttttacttttt

SEQ ID NO: 78728 - DNA, 40 bp, Homo sapiens
aaaagtaaaaataaaaaaattttggcacagggacagtggc

SEQ ID NO: 78729 - DNA, 40 bp, Homo sapiens
gccactgtccctgtgccaaaatttttttatttttactttt

SEQ ID NO: 78730 - DNA, 40 bp, Homo sapiens
aaagtaaaaataaaaaaattttggcacagggacagtggct

SEQ ID NO: 78731 - DNA, 40 bp, Homo sapiens
agccactgtccctgtgccaaaatttttttatttttacttt

SEQ ID NO: 78732 - DNA, 40 bp, Homo sapiens
aagtaaaaataaaaaaattttggcacagggacagtggctc

SEQ ID NO: 78733 - DNA, 40 bp, Homo sapiens
gagccactgtccctgtgccaaaatttttttatttttactt

SEQ ID NO: 78734 - DNA, 40 bp, Homo sapiens
agtaaaaataaaaaaattttggcacagggacagtggctca

SEQ ID NO: 78735 - DNA, 40 bp, Homo sapiens
tgagccactgtccctgtgccaaaatttttttatttttact

SEQ ID NO: 78736 - DNA, 40 bp, Homo sapiens
gtaaaaataaaaaaattttggcacagggacagtggctcac

SEQ ID NO: 78737 - DNA, 40 bp, Homo sapiens
gtgagccactgtccctgtgccaaaatttttttatttttac

SEQ ID NO: 78738 - DNA, 40 bp, Homo sapiens
taaaaataaaaaaattttggcacagggacagtggctcaca

SEQ ID NO: 78739 - DNA, 40 bp, Homo sapiens
tgtgagccactgtccctgtgccaaaatttttttattttta

SEQ ID NO: 78740 - DNA, 40 bp, Homo sapiens
aaaaataaaaaaattttggcacagggacagtggctcacac

SEQ ID NO: 78741 - DNA, 40 bp, Homo sapiens
gtgtgagccactgtccctgtgccaaaatttttttattttt

SEQ ID NO: 78742 - DNA, 40 bp, Homo sapiens
aaaataaaaaaattttggcacagggacagtggctcacact

SEQ ID NO: 78743 - DNA, 40 bp, Homo sapiens
agtgtgagccactgtccctgtgccaaaatttttttatttt

SEQ ID NO: 78744 - DNA, 40 bp, Homo sapiens
aaataaaaaaattttggcacagggacagtggctcacactt

SEQ ID NO: 78745 - DNA, 40 bp, Homo sapiens
aagtgtgagccactgtccctgtgccaaaatttttttattt

SEQ ID NO: 78746 - DNA, 40 bp, Homo sapiens
aataaaaaaattttggcacagggacagtggctcacactta

SEQ ID NO: 78747 - DNA, 40 bp, Homo sapiens
taagtgtgagccactgtccctgtgccaaaatttttttatt

SEQ ID NO: 78748 - DNA, 40 bp, Homo sapiens
ataaaaaaattttggcacagggacagtggctcacacttat

SEQ ID NO: 78749 - DNA, 40 bp, Homo sapiens
ataagtgtgagccactgtccctgtgccaaaatttttttat

SEQ ID NO: 78750 - DNA, 40 bp, Homo sapiens
taaaaaaattttggcacagggacagtggctcacacttata

SEQ ID NO: 78751 - DNA, 40 bp, Homo sapiens
tataagtgtgagccactgtccctgtgccaaaattttttta

SEQ ID NO: 78752 - DNA, 40 bp, Homo sapiens
aaaaaaattttggcacagggacagtggctcacacttataa

SEQ ID NO: 78753 - DNA, 40 bp, Homo sapiens
ttataagtgtgagccactgtccctgtgccaaaattttttt

SEQ ID NO: 78754 - DNA, 40 bp, Homo sapiens
aaaaaattttggcacagggacagtggctcacacttataat

SEQ ID NO: 78755 - DNA, 40 bp, Homo sapiens
attataagtgtgagccactgtccctgtgccaaaatttttt

SEQ ID NO: 78756 - DNA, 40 bp, Homo sapiens
aaaaattttggcacagggacagtggctcacacttataatg

SEQ ID NO: 78757 - DNA, 40 bp, Homo sapiens
cattataagtgtgagccactgtccctgtgccaaaattttt

SEQ ID NO: 78758 - DNA, 40 bp, Homo sapiens
aaaattttggcacagggacagtggctcacacttataatgc

SEQ ID NO: 78759 - DNA, 40 bp, Homo sapiens
gcattataagtgtgagccactgtccctgtgccaaaatttt

SEQ ID NO: 78760 - DNA, 40 bp, Homo sapiens
aaattttggcacagggacagtggctcacacttataatgcc

SEQ ID NO: 78761 - DNA, 40 bp, Homo sapiens
ggcattataagtgtgagccactgtccctgtgccaaaattt

SEQ ID NO: 78762 - DNA, 40 bp, Homo sapiens
aattttggcacagggacagtggctcacacttataatgcca

SEQ ID NO: 78763 - DNA, 40 bp, Homo sapiens
tggcattataagtgtgagccactgtccctgtgccaaaatt

SEQ ID NO: 78764 - DNA, 40 bp, Homo sapiens
attttggcacagggacagtggctcacacttataatgccag

SEQ ID NO: 78765 - DNA, 40 bp, Homo sapiens
ctggcattataagtgtgagccactgtccctgtgccaaaat

SEQ ID NO: 78766 - DNA, 40 bp, Homo sapiens
ttttggcacagggacagtggctcacacttataatgccaga

SEQ ID NO: 78767 - DNA, 40 bp, Homo sapiens
tctggcattataagtgtgagccactgtccctgtgccaaaa

SEQ ID NO: 78768 - DNA, 40 bp, Homo sapiens
tttggcacagggacagtggctcacacttataatgccagaa

SEQ ID NO: 78769 - DNA, 40 bp, Homo sapiens
ttctggcattataagtgtgagccactgtccctgtgccaaa

SEQ ID NO: 78770 - DNA, 40 bp, Homo sapiens
ttggcacagggacagtggctcacacttataatgccagaac

SEQ ID NO: 78771 - DNA, 40 bp, Homo sapiens
gttctggcattataagtgtgagccactgtccctgtgccaa

SEQ ID NO: 78772 - DNA, 40 bp, Homo sapiens
tggcacagggacagtggctcacacttataatgccagaact

SEQ ID NO: 78773 - DNA, 40 bp, Homo sapiens
agttctggcattataagtgtgagccactgtccctgtgcca

SEQ ID NO: 78774 - DNA, 40 bp, Homo sapiens
ggcacagggacagtggctcacacttataatgccagaactt

SEQ ID NO: 78775 - DNA, 40 bp, Homo sapiens
aagttctggcattataagtgtgagccactgtccctgtgcc

SEQ ID NO: 78776 - DNA, 40 bp, Homo sapiens
gcacagggacagtggctcacacttataatgccagaacttt

SEQ ID NO: 78777 - DNA, 40 bp, Homo sapiens
aaagttctggcattataagtgtgagccactgtccctgtgc

SEQ ID NO: 78778 - DNA, 40 bp, Homo sapiens
cacagggacagtggctcacacttataatgccagaacttta

SEQ ID NO: 78779 - DNA, 40 bp, Homo sapiens
taaagttctggcattataagtgtgagccactgtccctgtg

SEQ ID NO: 78780 - DNA, 40 bp, Homo sapiens
acagggacagtggctcacacttataatgccagaactttag

SEQ ID NO: 78781 - DNA, 40 bp, Homo sapiens
ctaaagttctggcattataagtgtgagccactgtccctgt

SEQ ID NO: 78782 - DNA, 40 bp, Homo sapiens
cagggacagtggctcacacttataatgccagaactttagg

SEQ ID NO: 78783 - DNA, 40 bp, Homo sapiens
cctaaagttctggcattataagtgtgagccactgtccctg

SEQ ID NO: 78784 - DNA, 40 bp, Homo sapiens
agggacagtggctcacacttataatgccagaactttagga

SEQ ID NO: 78785 - DNA, 40 bp, Homo sapiens
tcctaaagttctggcattataagtgtgagccactgtccct

SEQ ID NO: 78786 - DNA, 40 bp, Homo sapiens
gggacagtggctcacacttataatgccagaactttaggag

SEQ ID NO: 78787 - DNA, 40 bp, Homo sapiens
ctcctaaagttctggcattataagtgtgagccactgtccc

SEQ ID NO: 78788 - DNA, 40 bp, Homo sapiens
ggacagtggctcacacttataatgccagaactttaggagt

SEQ ID NO: 78789 - DNA, 40 bp, Homo sapiens
actcctaaagttctggcattataagtgtgagccactgtcc

SEQ ID NO: 78790 - DNA, 40 bp, Homo sapiens
gacagtggctcacacttataatgccagaactttaggagtc

SEQ ID NO: 78791 - DNA, 40 bp, Homo sapiens
gactcctaaagttctggcattataagtgtgagccactgtc

SEQ ID NO: 78792 - DNA, 40 bp, Homo sapiens
acagtggctcacacttataatgccagaactttaggagtcc

SEQ ID NO: 78793 - DNA, 40 bp, Homo sapiens
ggactcctaaagttctggcattataagtgtgagccactgt

SEQ ID NO: 78794 - DNA, 40 bp, Homo sapiens
cagtggctcacacttataatgccagaactttaggagtcca

SEQ ID NO: 78795 - DNA, 40 bp, Homo sapiens
tggactcctaaagttctggcattataagtgtgagccactg

SEQ ID NO: 78796 - DNA, 40 bp, Homo sapiens
agtggctcacacttataatgccagaactttaggagtccac

SEQ ID NO: 78797 - DNA, 40 bp, Homo sapiens
gtggactcctaaagttctggcattataagtgtgagccact

SEQ ID NO: 78798 - DNA, 40 bp, Homo sapiens
gtggctcacacttataatgccagaactttaggagtccaca

SEQ ID NO: 78799 - DNA, 40 bp, Homo sapiens
tgtggactcctaaagttctggcattataagtgtgagccac

SEQ ID NO: 78800 - DNA, 40 bp, Homo sapiens
tggctcacacttataatgccagaactttaggagtccacag

SEQ ID NO: 78801 - DNA, 40 bp, Homo sapiens
ctgtggactcctaaagttctggcattataagtgtgagcca

SEQ ID NO: 78802 - DNA, 40 bp, Homo sapiens
ggctcacacttataatgccagaactttaggagtccacagc

SEQ ID NO: 78803 - DNA, 40 bp, Homo sapiens
gctgtggactcctaaagttctggcattataagtgtgagcc

SEQ ID NO: 78804 - DNA, 40 bp, Homo sapiens
gctcacacttataatgccagaactttaggagtccacagcg

SEQ ID NO: 78805 - DNA, 40 bp, Homo sapiens
cgctgtggactcctaaagttctggcattataagtgtgagc

SEQ ID NO: 78806 - DNA, 40 bp, Homo sapiens
ctcacacttataatgccagaactttaggagtccacagcgc

SEQ ID NO: 78807 - DNA, 40 bp, Homo sapiens
gcgctgtggactcctaaagttctggcattataagtgtgag

SEQ ID NO: 78808 - DNA, 40 bp, Homo sapiens
tcacacttataatgccagaactttaggagtccacagcgcg

SEQ ID NO: 78809 - DNA, 40 bp, Homo sapiens
cgcgctgtggactcctaaagttctggcattataagtgtga

SEQ ID NO: 78810 - DNA, 40 bp, Homo sapiens
cacacttataatgccagaactttaggagtccacagcgcga

SEQ ID NO: 78811 - DNA, 40 bp, Homo sapiens
tcgcgctgtggactcctaaagttctggcattataagtgtg

SEQ ID NO: 78812 - DNA, 40 bp, Homo sapiens
acacttataatgccagaactttaggagtccacagcgcgag

SEQ ID NO: 78813 - DNA, 40 bp, Homo sapiens
ctcgcgctgtggactcctaaagttctggcattataagtgt

SEQ ID NO: 78814 - DNA, 40 bp, Homo sapiens
cacttataatgccagaactttaggagtccacagcgcgagg

SEQ ID NO: 78815 - DNA, 40 bp, Homo sapiens
cctcgcgctgtggactcctaaagttctggcattataagtg

SEQ ID NO: 78816 - DNA, 40 bp, Homo sapiens
acttataatgccagaactttaggagtccacagcgcgagga

SEQ ID NO: 78817 - DNA, 40 bp, Homo sapiens
tcctcgcgctgtggactcctaaagttctggcattataagt

SEQ ID NO: 78818 - DNA, 40 bp, Homo sapiens
cttataatgccagaactttaggagtccacagcgcgaggac

SEQ ID NO: 78819 - DNA, 40 bp, Homo sapiens
gtcctcgcgctgtggactcctaaagttctggcattataag

SEQ ID NO: 78820 - DNA, 40 bp, Homo sapiens
ttataatgccagaactttaggagtccacagcgcgaggact

SEQ ID NO: 78821 - DNA, 40 bp, Homo sapiens
agtcctcgcgctgtggactcctaaagttctggcattataa

SEQ ID NO: 78822 - DNA, 40 bp, Homo sapiens
tataatgccagaactttaggagtccacagcgcgaggactg

SEQ ID NO: 78823 - DNA, 40 bp, Homo sapiens
cagtcctcgcgctgtggactcctaaagttctggcattata

SEQ ID NO: 78824 - DNA, 40 bp, Homo sapiens
ataatgccagaactttaggagtccacagcgcgaggactgc

SEQ ID NO: 78825 - DNA, 40 bp, Homo sapiens
gcagtcctcgcgctgtggactcctaaagttctggcattat

SEQ ID NO: 78826 - DNA, 40 bp, Homo sapiens
taatgccagaactttaggagtccacagcgcgaggactgct

SEQ ID NO: 78827 - DNA, 40 bp, Homo sapiens
agcagtcctcgcgctgtggactcctaaagttctggcatta

SEQ ID NO: 78828 - DNA, 40 bp, Homo sapiens
aatgccagaactttaggagtccacagcgcgaggactgctt

SEQ ID NO: 78829 - DNA, 40 bp, Homo sapiens
aagcagtcctcgcgctgtggactcctaaagttctggcatt

SEQ ID NO: 78830 - DNA, 40 bp, Homo sapiens
atgccagaactttaggagtccacagcgcgaggactgcttg

SEQ ID NO: 78831 - DNA, 40 bp, Homo sapiens
caagcagtcctcgcgctgtggactcctaaagttctggcat

SEQ ID NO: 78832 - DNA, 40 bp, Homo sapiens
tgccagaactttaggagtccacagcgcgaggactgcttga

SEQ ID NO: 78833 - DNA, 40 bp, Homo sapiens
tcaagcagtcctcgcgctgtggactcctaaagttctggca

SEQ ID NO: 78834 - DNA, 40 bp, Homo sapiens
gccagaactttaggagtccacagcgcgaggactgcttgag

SEQ ID NO: 78835 - DNA, 40 bp, Homo sapiens
ctcaagcagtcctcgcgctgtggactcctaaagttctggc

SEQ ID NO: 78836 - DNA, 40 bp, Homo sapiens
ccagaactttaggagtccacagcgcgaggactgcttgagg

SEQ ID NO: 78837 - DNA, 40 bp, Homo sapiens
cctcaagcagtcctcgcgctgtggactcctaaagttctgg

SEQ ID NO: 78838 - DNA, 40 bp, Homo sapiens
cagaactttaggagtccacagcgcgaggactgcttgaggc

SEQ ID NO: 78839 - DNA, 40 bp, Homo sapiens
gcctcaagcagtcctcgcgctgtggactcctaaagttctg

SEQ ID NO: 78840 - DNA, 40 bp, Homo sapiens
agaactttaggagtccacagcgcgaggactgcttgaggcc

SEQ ID NO: 78841 - DNA, 40 bp, Homo sapiens
ggcctcaagcagtcctcgcgctgtggactcctaaagttct

SEQ ID NO: 78842 - DNA, 40 bp, Homo sapiens
gaactttaggagtccacagcgcgaggactgcttgaggcca

SEQ ID NO: 78843 - DNA, 40 bp, Homo sapiens
tggcctcaagcagtcctcgcgctgtggactcctaaagttc

SEQ ID NO: 78844 - DNA, 40 bp, Homo sapiens
aactttaggagtccacagcgcgaggactgcttgaggccag

SEQ ID NO: 78845 - DNA, 40 bp, Homo sapiens
ctggcctcaagcagtcctcgcgctgtggactcctaaagtt

SEQ ID NO: 78846 - DNA, 40 bp, Homo sapiens
actttaggagtccacagcgcgaggactgcttgaggccagg

SEQ ID NO: 78847 - DNA, 40 bp, Homo sapiens
cctggcctcaagcagtcctcgcgctgtggactcctaaagt

SEQ ID NO: 78848 - DNA, 40 bp, Homo sapiens
ctttaggagtccacagcgcgaggactgcttgaggccagga

SEQ ID NO: 78849 - DNA, 40 bp, Homo sapiens
tcctggcctcaagcagtcctcgcgctgtggactcctaaag

SEQ ID NO: 78850 - DNA, 40 bp, Homo sapiens
tttaggagtccacagcgcgaggactgcttgaggccaggag

SEQ ID NO: 78851 - DNA, 40 bp, Homo sapiens
ctcctggcctcaagcagtcctcgcgctgtggactcctaaa

SEQ ID NO: 78852 - DNA, 40 bp, Homo sapiens
ttaggagtccacagcgcgaggactgcttgaggccaggagt

SEQ ID NO: 78853 - DNA, 40 bp, Homo sapiens
actcctggcctcaagcagtcctcgcgctgtggactcctaa

SEQ ID NO: 78854 - DNA, 40 bp, Homo sapiens
taggagtccacagcgcgaggactgcttgaggccaggagtt

SEQ ID NO: 78855 - DNA, 40 bp, Homo sapiens
aactcctggcctcaagcagtcctcgcgctgtggactccta

SEQ ID NO: 78856 - DNA, 40 bp, Homo sapiens
aggagtccacagcgcgaggactgcttgaggccaggagttt

SEQ ID NO: 78857 - DNA, 40 bp, Homo sapiens
aaactcctggcctcaagcagtcctcgcgctgtggactcct

SEQ ID NO: 78858 - DNA, 40 bp, Homo sapiens
ggagtccacagcgcgaggactgcttgaggccaggagttta

SEQ ID NO: 78859 - DNA, 40 bp, Homo sapiens
taaactcctggcctcaagcagtcctcgcgctgtggactcc

SEQ ID NO: 78860 - DNA, 40 bp, Homo sapiens
gagtccacagcgcgaggactgcttgaggccaggagtttaa

SEQ ID NO: 78861 - DNA, 40 bp, Homo sapiens
ttaaactcctggcctcaagcagtcctcgcgctgtggactc

SEQ ID NO: 78862 - DNA, 40 bp, Homo sapiens
agtccacagcgcgaggactgcttgaggccaggagtttaag

SEQ ID NO: 78863 - DNA, 40 bp, Homo sapiens
cttaaactcctggcctcaagcagtcctcgcgctgtggact

SEQ ID NO: 78864 - DNA, 40 bp, Homo sapiens
gtccacagcgcgaggactgcttgaggccaggagtttaaga

SEQ ID NO: 78865 - DNA, 40 bp, Homo sapiens
tcttaaactcctggcctcaagcagtcctcgcgctgtggac

SEQ ID NO: 78866 - DNA, 40 bp, Homo sapiens
tccacagcgcgaggactgcttgaggccaggagtttaagac

SEQ ID NO: 78867 - DNA, 40 bp, Homo sapiens
gtcttaaactcctggcctcaagcagtcctcgcgctgtgga

SEQ ID NO: 78868 - DNA, 40 bp, Homo sapiens
ccacagcgcgaggactgcttgaggccaggagtttaagacc

SEQ ID NO: 78869 - DNA, 40 bp, Homo sapiens
ggtcttaaactcctggcctcaagcagtcctcgcgctgtgg

SEQ ID NO: 78870 - DNA, 40 bp, Homo sapiens
cacagcgcgaggactgcttgaggccaggagtttaagacca

SEQ ID NO: 78871 - DNA, 40 bp, Homo sapiens
tggtcttaaactcctggcctcaagcagtcctcgcgctgtg

SEQ ID NO: 78872 - DNA, 40 bp, Homo sapiens
acagcgcgaggactgcttgaggccaggagtttaagaccag

SEQ ID NO: 78873 - DNA, 40 bp, Homo sapiens
ctggtcttaaactcctggcctcaagcagtcctcgcgctgt

SEQ ID NO: 78874 - DNA, 40 bp, Homo sapiens
cagcgcgaggactgcttgaggccaggagtttaagaccaga

SEQ ID NO: 78875 - DNA, 40 bp, Homo sapiens
tctggtcttaaactcctggcctcaagcagtcctcgcgctg

SEQ ID NO: 78876 - DNA, 40 bp, Homo sapiens
agcgcgaggactgcttgaggccaggagtttaagaccagac

SEQ ID NO: 78877 - DNA, 40 bp, Homo sapiens
gtctggtcttaaactcctggcctcaagcagtcctcgcgct

SEQ ID NO: 78878 - DNA, 40 bp, Homo sapiens
gcgcgaggactgcttgaggccaggagtttaagaccagact

SEQ ID NO: 78879 - DNA, 40 bp, Homo sapiens
agtctggtcttaaactcctggcctcaagcagtcctcgcgc

SEQ ID NO: 78880 - DNA, 40 bp, Homo sapiens
cgcgaggactgcttgaggccaggagtttaagaccagactg

SEQ ID NO: 78881 - DNA, 40 bp, Homo sapiens
cagtctggtcttaaactcctggcctcaagcagtcctcgcg

SEQ ID NO: 78882 - DNA, 40 bp, Homo sapiens
gcgaggactgcttgaggccaggagtttaagaccagactgg

SEQ ID NO: 78883 - DNA, 40 bp, Homo sapiens
ccagtctggtcttaaactcctggcctcaagcagtcctcgc

SEQ ID NO: 78884 - DNA, 40 bp, Homo sapiens
cgaggactgcttgaggccaggagtttaagaccagactggg

SEQ ID NO: 78885 - DNA, 40 bp, Homo sapiens
cccagtctggtcttaaactcctggcctcaagcagtcctcg

SEQ ID NO: 78886 - DNA, 40 bp, Homo sapiens
gaggactgcttgaggccaggagtttaagaccagactgggc

SEQ ID NO: 78887 - DNA, 40 bp, Homo sapiens
gcccagtctggtcttaaactcctggcctcaagcagtcctc

SEQ ID NO: 78888 - DNA, 40 bp, Homo sapiens
aggactgcttgaggccaggagtttaagaccagactgggca

SEQ ID NO: 78889 - DNA, 40 bp, Homo sapiens
tgcccagtctggtcttaaactcctggcctcaagcagtcct

SEQ ID NO: 78890 - DNA, 40 bp, Homo sapiens
ggactgcttgaggccaggagtttaagaccagactgggcaa

SEQ ID NO: 78891 - DNA, 40 bp, Homo sapiens
ttgcccagtctggtcttaaactcctggcctcaagcagtcc

SEQ ID NO: 78892 - DNA, 40 bp, Homo sapiens
gactgcttgaggccaggagtttaagaccagactgggcaac

SEQ ID NO: 78893 - DNA, 40 bp, Homo sapiens
gttgcccagtctggtcttaaactcctggcctcaagcagtc

SEQ ID NO: 78894 - DNA, 40 bp, Homo sapiens
actgcttgaggccaggagtttaagaccagactgggcaacg

SEQ ID NO: 78895 - DNA, 40 bp, Homo sapiens
cgttgcccagtctggtcttaaactcctggcctcaagcagt

SEQ ID NO: 78896 - DNA, 40 bp, Homo sapiens
ctgcttgaggccaggagtttaagaccagactgggcaacgt

SEQ ID NO: 78897 - DNA, 40 bp, Homo sapiens
acgttgcccagtctggtcttaaactcctggcctcaagcag

SEQ ID NO: 78898 - DNA, 40 bp, Homo sapiens
tgcttgaggccaggagtttaagaccagactgggcaacgta

SEQ ID NO: 78899 - DNA, 40 bp, Homo sapiens
tacgttgcccagtctggtcttaaactcctggcctcaagca

SEQ ID NO: 78900 - DNA, 40 bp, Homo sapiens
gcttgaggccaggagtttaagaccagactgggcaacgtaa

SEQ ID NO: 78901 - DNA, 40 bp, Homo sapiens
ttacgttgcccagtctggtcttaaactcctggcctcaagc

SEQ ID NO: 78902 - DNA, 40 bp, Homo sapiens
cttgaggccaggagtttaagaccagactgggcaacgtaat

SEQ ID NO: 78903 - DNA, 40 bp, Homo sapiens
attacgttgcccagtctggtcttaaactcctggcctcaag

SEQ ID NO: 78904 - DNA, 40 bp, Homo sapiens
ttgaggccaggagtttaagaccagactgggcaacgtaatg

SEQ ID NO: 78905 - DNA, 40 bp, Homo sapiens
cattacgttgcccagtctggtcttaaactcctggcctcaa

SEQ ID NO: 78906 - DNA, 40 bp, Homo sapiens
tgaggccaggagtttaagaccagactgggcaacgtaatga

SEQ ID NO: 78907 - DNA, 40 bp, Homo sapiens
tcattacgttgcccagtctggtcttaaactcctggcctca

SEQ ID NO: 78908 - DNA, 40 bp, Homo sapiens
gaggccaggagtttaagaccagactgggcaacgtaatgag

SEQ ID NO: 78909 - DNA, 40 bp, Homo sapiens
ctcattacgttgcccagtctggtcttaaactcctggcctc

SEQ ID NO: 78910 - DNA, 40 bp, Homo sapiens
aggccaggagtttaagaccagactgggcaacgtaatgaga

SEQ ID NO: 78911 - DNA, 40 bp, Homo sapiens
tctcattacgttgcccagtctggtcttaaactcctggcct

SEQ ID NO: 78912 - DNA, 40 bp, Homo sapiens
ggccaggagtttaagaccagactgggcaacgtaatgagac

SEQ ID NO: 78913 - DNA, 40 bp, Homo sapiens
gtctcattacgttgcccagtctggtcttaaactcctggcc

SEQ ID NO: 78914 - DNA, 40 bp, Homo sapiens
gccaggagtttaagaccagactgggcaacgtaatgagacc

SEQ ID NO: 78915 - DNA, 40 bp, Homo sapiens
ggtctcattacgttgcccagtctggtcttaaactcctggc

SEQ ID NO: 78916 - DNA, 40 bp, Homo sapiens
ccaggagtttaagaccagactgggcaacgtaatgagaccc

SEQ ID NO: 78917 - DNA, 40 bp, Homo sapiens
gggtctcattacgttgcccagtctggtcttaaactcctgg

SEQ ID NO: 78918 - DNA, 40 bp, Homo sapiens
caggagtttaagaccagactgggcaacgtaatgagacccc

SEQ ID NO: 78919 - DNA, 40 bp, Homo sapiens
ggggtctcattacgttgcccagtctggtcttaaactcctg

SEQ ID NO: 78920 - DNA, 40 bp, Homo sapiens
aggagtttaagaccagactgggcaacgtaatgagacccca

SEQ ID NO: 78921 - DNA, 40 bp, Homo sapiens
tggggtctcattacgttgcccagtctggtcttaaactcct

SEQ ID NO: 78922 - DNA, 40 bp, Homo sapiens
ggagtttaagaccagactgggcaacgtaatgagaccccac

SEQ ID NO: 78923 - DNA, 40 bp, Homo sapiens
gtggggtctcattacgttgcccagtctggtcttaaactcc

SEQ ID NO: 78924 - DNA, 40 bp, Homo sapiens
gagtttaagaccagactgggcaacgtaatgagaccccacc

SEQ ID NO: 78925 - DNA, 40 bp, Homo sapiens
ggtggggtctcattacgttgcccagtctggtcttaaactc

SEQ ID NO: 78926 - DNA, 40 bp, Homo sapiens
agtttaagaccagactgggcaacgtaatgagaccccacct

SEQ ID NO: 78927 - DNA, 40 bp, Homo sapiens
aggtggggtctcattacgttgcccagtctggtcttaaact

SEQ ID NO: 78928 - DNA, 40 bp, Homo sapiens
gtttaagaccagactgggcaacgtaatgagaccccacctt

SEQ ID NO: 78929 - DNA, 40 bp, Homo sapiens
aaggtggggtctcattacgttgcccagtctggtcttaaac

SEQ ID NO: 78930 - DNA, 40 bp, Homo sapiens
tttaagaccagactgggcaacgtaatgagaccccaccttt

SEQ ID NO: 78931 - DNA, 40 bp, Homo sapiens
aaaggtggggtctcattacgttgcccagtctggtcttaaa

SEQ ID NO: 78932 - DNA, 40 bp, Homo sapiens
ttaagaccagactgggcaacgtaatgagaccccaccttta

SEQ ID NO: 78933 - DNA, 40 bp, Homo sapiens
taaaggtggggtctcattacgttgcccagtctggtcttaa

SEQ ID NO: 78934 - DNA, 40 bp, Homo sapiens
taagaccagactgggcaacgtaatgagaccccacctttag

SEQ ID NO: 78935 - DNA, 40 bp, Homo sapiens
ctaaaggtggggtctcattacgttgcccagtctggtctta

SEQ ID NO: 78936 - DNA, 40 bp, Homo sapiens
aagaccagactgggcaacgtaatgagaccccacctttagg

SEQ ID NO: 78937 - DNA, 40 bp, Homo sapiens
cctaaaggtggggtctcattacgttgcccagtctggtctt

SEQ ID NO: 78938 - DNA, 40 bp, Homo sapiens
agaccagactgggcaacgtaatgagaccccacctttagga

SEQ ID NO: 78939 - DNA, 40 bp, Homo sapiens
tcctaaaggtggggtctcattacgttgcccagtctggtct

SEQ ID NO: 78940 - DNA, 40 bp, Homo sapiens
gaccagactgggcaacgtaatgagaccccacctttaggaa

SEQ ID NO: 78941 - DNA, 40 bp, Homo sapiens
ttcctaaaggtggggtctcattacgttgcccagtctggtc

SEQ ID NO: 78942 - DNA, 40 bp, Homo sapiens
accagactgggcaacgtaatgagaccccacctttaggaaa

SEQ ID NO: 78943 - DNA, 40 bp, Homo sapiens
tttcctaaaggtggggtctcattacgttgcccagtctggt

SEQ ID NO: 78944 - DNA, 40 bp, Homo sapiens
ccagactgggcaacgtaatgagaccccacctttaggaaat

SEQ ID NO: 78945 - DNA, 40 bp, Homo sapiens
atttcctaaaggtggggtctcattacgttgcccagtctgg

SEQ ID NO: 78946 - DNA, 40 bp, Homo sapiens
cagactgggcaacgtaatgagaccccacctttaggaaata

SEQ ID NO: 78947 - DNA, 40 bp, Homo sapiens
tatttcctaaaggtggggtctcattacgttgcccagtctg

SEQ ID NO: 78948 - DNA, 40 bp, Homo sapiens
agactgggcaacgtaatgagaccccacctttaggaaataa

SEQ ID NO: 78949 - DNA, 40 bp, Homo sapiens
ttatttcctaaaggtggggtctcattacgttgcccagtct

SEQ ID NO: 78950 - DNA, 40 bp, Homo sapiens
gactgggcaacgtaatgagaccccacctttaggaaataaa

SEQ ID NO: 78951 - DNA, 40 bp, Homo sapiens
tttatttcctaaaggtggggtctcattacgttgcccagtc

SEQ ID NO: 78952 - DNA, 40 bp, Homo sapiens
actgggcaacgtaatgagaccccacctttaggaaataaat

SEQ ID NO: 78953 - DNA, 40 bp, Homo sapiens
atttatttcctaaaggtggggtctcattacgttgcccagt

SEQ ID NO: 78954 - DNA, 40 bp, Homo sapiens
ctgggcaacgtaatgagaccccacctttaggaaataaata

SEQ ID NO: 78955 - DNA, 40 bp, Homo sapiens
tatttatttcctaaaggtggggtctcattacgttgcccag

SEQ ID NO: 78956 - DNA, 40 bp, Homo sapiens
tgggcaacgtaatgagaccccacctttaggaaataaatac

SEQ ID NO: 78957 - DNA, 40 bp, Homo sapiens
gtatttatttcctaaaggtggggtctcattacgttgccca

SEQ ID NO: 78958 - DNA, 40 bp, Homo sapiens
gggcaacgtaatgagaccccacctttaggaaataaataca

SEQ ID NO: 78959 - DNA, 40 bp, Homo sapiens
tgtatttatttcctaaaggtggggtctcattacgttgccc

SEQ ID NO: 78960 - DNA, 40 bp, Homo sapiens
ggcaacgtaatgagaccccacctttaggaaataaatacat

SEQ ID NO: 78961 - DNA, 40 bp, Homo sapiens
atgtatttatttcctaaaggtggggtctcattacgttgcc

SEQ ID NO: 78962 - DNA, 40 bp, Homo sapiens
gcaacgtaatgagaccccacctttaggaaataaatacata

SEQ ID NO: 78963 - DNA, 40 bp, Homo sapiens
tatgtatttatttcctaaaggtggggtctcattacgttgc

SEQ ID NO: 78964 - DNA, 40 bp, Homo sapiens
caacgtaatgagaccccacctttaggaaataaatacataa

SEQ ID NO: 78965 - DNA, 40 bp, Homo sapiens
ttatgtatttatttcctaaaggtggggtctcattacgttg

SEQ ID NO: 78966 - DNA, 40 bp, Homo sapiens
aacgtaatgagaccccacctttaggaaataaatacataaa

SEQ ID NO: 78967 - DNA, 40 bp, Homo sapiens
tttatgtatttatttcctaaaggtggggtctcattacgtt

SEQ ID NO: 78968 - DNA, 40 bp, Homo sapiens
acgtaatgagaccccacctttaggaaataaatacataaat

SEQ ID NO: 78969 - DNA, 40 bp, Homo sapiens
atttatgtatttatttcctaaaggtggggtctcattacgt

SEQ ID NO: 78970 - DNA, 40 bp, Homo sapiens
cgtaatgagaccccacctttaggaaataaatacataaata

SEQ ID NO: 78971 - DNA, 40 bp, Homo sapiens
tatttatgtatttatttcctaaaggtggggtctcattacg

SEQ ID NO: 78972 - DNA, 40 bp, Homo sapiens
gtaatgagaccccacctttaggaaataaatacataaataa

SEQ ID NO: 78973 - DNA, 40 bp, Homo sapiens
ttatttatgtatttatttcctaaaggtggggtctcattac

SEQ ID NO: 78974 - DNA, 40 bp, Homo sapiens
taatgagaccccacctttaggaaataaatacataaataaa

SEQ ID NO: 78975 - DNA, 40 bp, Homo sapiens
tttatttatgtatttatttcctaaaggtggggtctcatta

SEQ ID NO: 78976 - DNA, 40 bp, Homo sapiens
aatgagaccccacctttaggaaataaatacataaataaaa

SEQ ID NO: 78977 - DNA, 40 bp, Homo sapiens
ttttatttatgtatttatttcctaaaggtggggtctcatt

SEQ ID NO: 78978 - DNA, 40 bp, Homo sapiens
atgagaccccacctttaggaaataaatacataaataaaaa

SEQ ID NO: 78979 - DNA, 40 bp, Homo sapiens
tttttatttatgtatttatttcctaaaggtggggtctcat

SEQ ID NO: 78980 - DNA, 40 bp, Homo sapiens
tgagaccccacctttaggaaataaatacataaataaaaat

SEQ ID NO: 78981 - DNA, 40 bp, Homo sapiens
atttttatttatgtatttatttcctaaaggtggggtctca

SEQ ID NO: 78982 - DNA, 40 bp, Homo sapiens
gagaccccacctttaggaaataaatacataaataaaaatt

SEQ ID NO: 78983 - DNA, 40 bp, Homo sapiens
aatttttatttatgtatttatttcctaaaggtggggtctc

SEQ ID NO: 78984 - DNA, 40 bp, Homo sapiens
agaccccacctttaggaaataaatacataaataaaaattt

SEQ ID NO: 78985 - DNA, 40 bp, Homo sapiens
aaatttttatttatgtatttatttcctaaaggtggggtct

SEQ ID NO: 78986 - DNA, 40 bp, Homo sapiens
gaccccacctttaggaaataaatacataaataaaaatttg

SEQ ID NO: 78987 - DNA, 40 bp, Homo sapiens
caaatttttatttatgtatttatttcctaaaggtggggtc

SEQ ID NO: 78988 - DNA, 40 bp, Homo sapiens
accccacctttaggaaataaatacataaataaaaatttga

SEQ ID NO: 78989 - DNA, 40 bp, Homo sapiens
tcaaatttttatttatgtatttatttcctaaaggtggggt

SEQ ID NO: 78990 - DNA, 40 bp, Homo sapiens
ccccacctttaggaaataaatacataaataaaaatttgac

SEQ ID NO: 78991 - DNA, 40 bp, Homo sapiens
gtcaaatttttatttatgtatttatttcctaaaggtgggg

SEQ ID NO: 78992 - DNA, 40 bp, Homo sapiens
cccacctttaggaaataaatacataaataaaaatttgaca

SEQ ID NO: 78993 - DNA, 40 bp, Homo sapiens
tgtcaaatttttatttatgtatttatttcctaaaggtggg

SEQ ID NO: 78994 - DNA, 40 bp, Homo sapiens
ccacctttaggaaataaatacataaataaaaatttgacaa

SEQ ID NO: 78995 - DNA, 40 bp, Homo sapiens
ttgtcaaatttttatttatgtatttatttcctaaaggtgg

SEQ ID NO: 78996 - DNA, 40 bp, Homo sapiens
cacctttaggaaataaatacataaataaaaatttgacaat

SEQ ID NO: 78997 - DNA, 40 bp, Homo sapiens
attgtcaaatttttatttatgtatttatttcctaaaggtg

SEQ ID NO: 78998 - DNA, 40 bp, Homo sapiens
acctttaggaaataaatacataaataaaaatttgacaatg

SEQ ID NO: 78999 - DNA, 40 bp, Homo sapiens
cattgtcaaatttttatttatgtatttatttcctaaaggt

SEQ ID NO: 79000 - DNA, 40 bp, Homo sapiens
cctttaggaaataaatacataaataaaaatttgacaatga

SEQ ID NO: 79001 - DNA, 40 bp, Homo sapiens
tcattgtcaaatttttatttatgtatttatttcctaaagg

SEQ ID NO: 79002 - DNA, 40 bp, Homo sapiens
ctttaggaaataaatacataaataaaaatttgacaatgat

SEQ ID NO: 79003 - DNA, 40 bp, Homo sapiens
atcattgtcaaatttttatttatgtatttatttcctaaag

SEQ ID NO: 79004 - DNA, 40 bp, Homo sapiens
tttaggaaataaatacataaataaaaatttgacaatgata

SEQ ID NO: 79005 - DNA, 40 bp, Homo sapiens
tatcattgtcaaatttttatttatgtatttatttcctaaa

SEQ ID NO: 79006 - DNA, 40 bp, Homo sapiens
ttaggaaataaatacataaataaaaatttgacaatgataa

SEQ ID NO: 79007 - DNA, 40 bp, Homo sapiens
ttatcattgtcaaatttttatttatgtatttatttcctaa

SEQ ID NO: 79008 - DNA, 40 bp, Homo sapiens
taggaaataaatacataaataaaaatttgacaatgataaa

SEQ ID NO: 79009 - DNA, 40 bp, Homo sapiens
tttatcattgtcaaatttttatttatgtatttatttccta

SEQ ID NO: 79010 - DNA, 40 bp, Homo sapiens
aggaaataaatacataaataaaaatttgacaatgataaac

SEQ ID NO: 79011 - DNA, 40 bp, Homo sapiens
gtttatcattgtcaaatttttatttatgtatttatttcct

SEQ ID NO: 79012 - DNA, 40 bp, Homo sapiens
ggaaataaatacataaataaaaatttgacaatgataaaca

SEQ ID NO: 79013 - DNA, 40 bp, Homo sapiens
tgtttatcattgtcaaatttttatttatgtatttatttcc

SEQ ID NO: 79014 - DNA, 40 bp, Homo sapiens
gaaataaatacataaataaaaatttgacaatgataaacat

SEQ ID NO: 79015 - DNA, 40 bp, Homo sapiens
atgtttatcattgtcaaatttttatttatgtatttatttc

SEQ ID NO: 79016 - DNA, 40 bp, Homo sapiens
aaataaatacataaataaaaatttgacaatgataaacata

SEQ ID NO: 79017 - DNA, 40 bp, Homo sapiens
tatgtttatcattgtcaaatttttatttatgtatttattt

SEQ ID NO: 79018 - DNA, 40 bp, Homo sapiens
aataaatacataaataaaaatttgacaatgataaacatat

SEQ ID NO: 79019 - DNA, 40 bp, Homo sapiens
atatgtttatcattgtcaaatttttatttatgtatttatt

SEQ ID NO: 79020 - DNA, 40 bp, Homo sapiens
ataaatacataaataaaaatttgacaatgataaacatata

SEQ ID NO: 79021 - DNA, 40 bp, Homo sapiens
tatatgtttatcattgtcaaatttttatttatgtatttat

SEQ ID NO: 79022 - DNA, 40 bp, Homo sapiens
taaatacataaataaaaatttgacaatgataaacatatat

SEQ ID NO: 79023 - DNA, 40 bp, Homo sapiens
atatatgtttatcattgtcaaatttttatttatgtattta

SEQ ID NO: 79024 - DNA, 40 bp, Homo sapiens
aaatacataaataaaaatttgacaatgataaacatatata

SEQ ID NO: 79025 - DNA, 40 bp, Homo sapiens
tatatatgtttatcattgtcaaatttttatttatgtattt

SEQ ID NO: 79026 - DNA, 40 bp, Homo sapiens
aatacataaataaaaatttgacaatgataaacatatataa

SEQ ID NO: 79027 - DNA, 40 bp, Homo sapiens
ttatatatgtttatcattgtcaaatttttatttatgtatt

SEQ ID NO: 79028 - DNA, 40 bp, Homo sapiens
atacataaataaaaatttgacaatgataaacatatataaa

SEQ ID NO: 79029 - DNA, 40 bp, Homo sapiens
tttatatatgtttatcattgtcaaatttttatttatgtat

SEQ ID NO: 79030 - DNA, 40 bp, Homo sapiens
tacataaataaaaatttgacaatgataaacatatataaat

SEQ ID NO: 79031 - DNA, 40 bp, Homo sapiens
atttatatatgtttatcattgtcaaatttttatttatgta

SEQ ID NO: 79032 - DNA, 40 bp, Homo sapiens
acataaataaaaatttgacaatgataaacatatataaatt

SEQ ID NO: 79033 - DNA, 40 bp, Homo sapiens
aatttatatatgtttatcattgtcaaatttttatttatgt

SEQ ID NO: 79034 - DNA, 40 bp, Homo sapiens
cataaataaaaatttgacaatgataaacatatataaatta

SEQ ID NO: 79035 - DNA, 40 bp, Homo sapiens
taatttatatatgtttatcattgtcaaatttttatttatg

SEQ ID NO: 79036 - DNA, 40 bp, Homo sapiens
ataaataaaaatttgacaatgataaacatatataaattag

SEQ ID NO: 79037 - DNA, 40 bp, Homo sapiens
ctaatttatatatgtttatcattgtcaaatttttatttat

SEQ ID NO: 79038 - DNA, 40 bp, Homo sapiens
taaataaaaatttgacaatgataaacatatataaattagc

SEQ ID NO: 79039 - DNA, 40 bp, Homo sapiens
gctaatttatatatgtttatcattgtcaaatttttattta

SEQ ID NO: 79040 - DNA, 40 bp, Homo sapiens
aaataaaaatttgacaatgataaacatatataaattagct

SEQ ID NO: 79041 - DNA, 40 bp, Homo sapiens
agctaatttatatatgtttatcattgtcaaatttttattt

SEQ ID NO: 79042 - DNA, 40 bp, Homo sapiens
aataaaaatttgacaatgataaacatatataaattagctt

SEQ ID NO: 79043 - DNA, 40 bp, Homo sapiens
aagctaatttatatatgtttatcattgtcaaatttttatt

SEQ ID NO: 79044 - DNA, 40 bp, Homo sapiens
ataaaaatttgacaatgataaacatatataaattagcttt

SEQ ID NO: 79045 - DNA, 40 bp, Homo sapiens
aaagctaatttatatatgtttatcattgtcaaatttttat

SEQ ID NO: 79046 - DNA, 40 bp, Homo sapiens
taaaaatttgacaatgataaacatatataaattagctttt

SEQ ID NO: 79047 - DNA, 40 bp, Homo sapiens
aaaagctaatttatatatgtttatcattgtcaaattttta

SEQ ID NO: 79048 - DNA, 40 bp, Homo sapiens
aaaaatttgacaatgataaacatatataaattagcttttc

SEQ ID NO: 79049 - DNA, 40 bp, Homo sapiens
gaaaagctaatttatatatgtttatcattgtcaaattttt

SEQ ID NO: 79050 - DNA, 40 bp, Homo sapiens
aaaatttgacaatgataaacatatataaattagcttttct

SEQ ID NO: 79051 - DNA, 40 bp, Homo sapiens
agaaaagctaatttatatatgtttatcattgtcaaatttt

SEQ ID NO: 79052 - DNA, 40 bp, Homo sapiens
aaatttgacaatgataaacatatataaattagcttttctt

SEQ ID NO: 79053 - DNA, 40 bp, Homo sapiens
aagaaaagctaatttatatatgtttatcattgtcaaattt

SEQ ID NO: 79054 - DNA, 40 bp, Homo sapiens
aatttgacaatgataaacatatataaattagcttttctta

SEQ ID NO: 79055 - DNA, 40 bp, Homo sapiens
taagaaaagctaatttatatatgtttatcattgtcaaatt

SEQ ID NO: 79056 - DNA, 40 bp, Homo sapiens
atttgacaatgataaacatatataaattagcttttcttag

SEQ ID NO: 79057 - DNA, 40 bp, Homo sapiens
ctaagaaaagctaatttatatatgtttatcattgtcaaat

SEQ ID NO: 79058 - DNA, 40 bp, Homo sapiens
tttgacaatgataaacatatataaattagcttttcttagt

SEQ ID NO: 79059 - DNA, 40 bp, Homo sapiens
actaagaaaagctaatttatatatgtttatcattgtcaaa

SEQ ID NO: 79060 - DNA, 40 bp, Homo sapiens
ttgacaatgataaacatatataaattagcttttcttagtc

SEQ ID NO: 79061 - DNA, 40 bp, Homo sapiens
gactaagaaaagctaatttatatatgtttatcattgtcaa

SEQ ID NO: 79062 - DNA, 40 bp, Homo sapiens
tgacaatgataaacatatataaattagcttttcttagtcc

SEQ ID NO: 79063 - DNA, 40 bp, Homo sapiens
ggactaagaaaagctaatttatatatgtttatcattgtca

SEQ ID NO: 79064 - DNA, 40 bp, Homo sapiens
gacaatgataaacatatataaattagcttttcttagtcct

SEQ ID NO: 79065 - DNA, 40 bp, Homo sapiens
aggactaagaaaagctaatttatatatgtttatcattgtc

SEQ ID NO: 79066 - DNA, 40 bp, Homo sapiens
acaatgataaacatatataaattagcttttcttagtcctg

SEQ ID NO: 79067 - DNA, 40 bp, Homo sapiens
caggactaagaaaagctaatttatatatgtttatcattgt

SEQ ID NO: 79068 - DNA, 40 bp, Homo sapiens
caatgataaacatatataaattagcttttcttagtcctga

SEQ ID NO: 79069 - DNA, 40 bp, Homo sapiens
tcaggactaagaaaagctaatttatatatgtttatcattg

SEQ ID NO: 79070 - DNA, 40 bp, Homo sapiens
aatgataaacatatataaattagcttttcttagtcctgaa

SEQ ID NO: 79071 - DNA, 40 bp, Homo sapiens
ttcaggactaagaaaagctaatttatatatgtttatcatt

SEQ ID NO: 79072 - DNA, 40 bp, Homo sapiens
atgataaacatatataaattagcttttcttagtcctgaaa

SEQ ID NO: 79073 - DNA, 40 bp, Homo sapiens
tttcaggactaagaaaagctaatttatatatgtttatcat

SEQ ID NO: 79074 - DNA, 40 bp, Homo sapiens
tgataaacatatataaattagcttttcttagtcctgaaaa

SEQ ID NO: 79075 - DNA, 40 bp, Homo sapiens
ttttcaggactaagaaaagctaatttatatatgtttatca

SEQ ID NO: 79076 - DNA, 40 bp, Homo sapiens
gataaacatatataaattagcttttcttagtcctgaaaaa

SEQ ID NO: 79077 - DNA, 40 bp, Homo sapiens
tttttcaggactaagaaaagctaatttatatatgtttatc

SEQ ID NO: 79078 - DNA, 40 bp, Homo sapiens
ataaacatatataaattagcttttcttagtcctgaaaaag

SEQ ID NO: 79079 - DNA, 40 bp, Homo sapiens
ctttttcaggactaagaaaagctaatttatatatgtttat

SEQ ID NO: 79080 - DNA, 40 bp, Homo sapiens
taaacatatataaattagcttttcttagtcctgaaaaaga

SEQ ID NO: 79081 - DNA, 40 bp, Homo sapiens
tctttttcaggactaagaaaagctaatttatatatgttta

SEQ ID NO: 79082 - DNA, 40 bp, Homo sapiens
aaacatatataaattagcttttcttagtcctgaaaaagat

SEQ ID NO: 79083 - DNA, 40 bp, Homo sapiens
atctttttcaggactaagaaaagctaatttatatatgttt

SEQ ID NO: 79084 - DNA, 40 bp, Homo sapiens
aacatatataaattagcttttcttagtcctgaaaaagata

SEQ ID NO: 79085 - DNA, 40 bp, Homo sapiens
tatctttttcaggactaagaaaagctaatttatatatgtt

SEQ ID NO: 79086 - DNA, 40 bp, Homo sapiens
acatatataaattagcttttcttagtcctgaaaaagataa

SEQ ID NO: 79087 - DNA, 40 bp, Homo sapiens
ttatctttttcaggactaagaaaagctaatttatatatgt

SEQ ID NO: 79088 - DNA, 40 bp, Homo sapiens
catatataaattagcttttcttagtcctgaaaaagataat

SEQ ID NO: 79089 - DNA, 40 bp, Homo sapiens
attatctttttcaggactaagaaaagctaatttatatatg

SEQ ID NO: 79090 - DNA, 40 bp, Homo sapiens
atatataaattagcttttcttagtcctgaaaaagataatg

SEQ ID NO: 79091 - DNA, 40 bp, Homo sapiens
cattatctttttcaggactaagaaaagctaatttatatat

SEQ ID NO: 79092 - DNA, 40 bp, Homo sapiens
tatataaattagcttttcttagtcctgaaaaagataatgt

SEQ ID NO: 79093 - DNA, 40 bp, Homo sapiens
acattatctttttcaggactaagaaaagctaatttatata

SEQ ID NO: 79094 - DNA, 40 bp, Homo sapiens
atataaattagcttttcttagtcctgaaaaagataatgtt

SEQ ID NO: 79095 - DNA, 40 bp, Homo sapiens
aacattatctttttcaggactaagaaaagctaatttatat

SEQ ID NO: 79096 - DNA, 40 bp, Homo sapiens
tataaattagcttttcttagtcctgaaaaagataatgtta

SEQ ID NO: 79097 - DNA, 40 bp, Homo sapiens
taacattatctttttcaggactaagaaaagctaatttata

SEQ ID NO: 79098 - DNA, 40 bp, Homo sapiens
ataaattagcttttcttagtcctgaaaaagataatgttat

SEQ ID NO: 79099 - DNA, 40 bp, Homo sapiens
ataacattatctttttcaggactaagaaaagctaatttat

SEQ ID NO: 79100 - DNA, 40 bp, Homo sapiens
taaattagcttttcttagtcctgaaaaagataatgttatg

SEQ ID NO: 79101 - DNA, 40 bp, Homo sapiens
cataacattatctttttcaggactaagaaaagctaattta

SEQ ID NO: 79102 - DNA, 40 bp, Homo sapiens
aaattagcttttcttagtcctgaaaaagataatgttatgt

SEQ ID NO: 79103 - DNA, 40 bp, Homo sapiens
acataacattatctttttcaggactaagaaaagctaattt

SEQ ID NO: 79104 - DNA, 40 bp, Homo sapiens
aattagcttttcttagtcctgaaaaagataatgttatgtg

SEQ ID NO: 79105 - DNA, 40 bp, Homo sapiens
cacataacattatctttttcaggactaagaaaagctaatt

SEQ ID NO: 79106 - DNA, 40 bp, Homo sapiens
attagcttttcttagtcctgaaaaagataatgttatgtgt

SEQ ID NO: 79107 - DNA, 40 bp, Homo sapiens
acacataacattatctttttcaggactaagaaaagctaat

SEQ ID NO: 79108 - DNA, 40 bp, Homo sapiens
ttagcttttcttagtcctgaaaaagataatgttatgtgta

SEQ ID NO: 79109 - DNA, 40 bp, Homo sapiens
tacacataacattatctttttcaggactaagaaaagctaa

SEQ ID NO: 79110 - DNA, 40 bp, Homo sapiens
tagcttttcttagtcctgaaaaagataatgttatgtgtat

SEQ ID NO: 79111 - DNA, 40 bp, Homo sapiens
atacacataacattatctttttcaggactaagaaaagcta

SEQ ID NO: 79112 - DNA, 40 bp, Homo sapiens
agcttttcttagtcctgaaaaagataatgttatgtgtatg

SEQ ID NO: 79113 - DNA, 40 bp, Homo sapiens
catacacataacattatctttttcaggactaagaaaagct

SEQ ID NO: 79114 - DNA, 40 bp, Homo sapiens
gcttttcttagtcctgaaaaagataatgttatgtgtatgt

SEQ ID NO: 79115 - DNA, 40 bp, Homo sapiens
acatacacataacattatctttttcaggactaagaaaagc

SEQ ID NO: 79116 - DNA, 40 bp, Homo sapiens
cttttcttagtcctgaaaaagataatgttatgtgtatgtg

SEQ ID NO: 79117 - DNA, 40 bp, Homo sapiens
cacatacacataacattatctttttcaggactaagaaaag

SEQ ID NO: 79118 - DNA, 40 bp, Homo sapiens
ttttcttagtcctgaaaaagataatgttatgtgtatgtgt

SEQ ID NO: 79119 - DNA, 40 bp, Homo sapiens
acacatacacataacattatctttttcaggactaagaaaa

SEQ ID NO: 79120 - DNA, 40 bp, Homo sapiens
tttcttagtcctgaaaaagataatgttatgtgtatgtgtg

SEQ ID NO: 79121 - DNA, 40 bp, Homo sapiens
cacacatacacataacattatctttttcaggactaagaaa

SEQ ID NO: 79122 - DNA, 40 bp, Homo sapiens
ttcttagtcctgaaaaagataatgttatgtgtatgtgtga

SEQ ID NO: 79123 - DNA, 40 bp, Homo sapiens
tcacacatacacataacattatctttttcaggactaagaa

SEQ ID NO: 79124 - DNA, 40 bp, Homo sapiens
tcttagtcctgaaaaagataatgttatgtgtatgtgtgag

SEQ ID NO: 79125 - DNA, 40 bp, Homo sapiens
ctcacacatacacataacattatctttttcaggactaaga

SEQ ID NO: 79126 - DNA, 40 bp, Homo sapiens
cttagtcctgaaaaagataatgttatgtgtatgtgtgaga

SEQ ID NO: 79127 - DNA, 40 bp, Homo sapiens
tctcacacatacacataacattatctttttcaggactaag

SEQ ID NO: 79128 - DNA, 40 bp, Homo sapiens
ttagtcctgaaaaagataatgttatgtgtatgtgtgagaa

SEQ ID NO: 79129 - DNA, 40 bp, Homo sapiens
ttctcacacatacacataacattatctttttcaggactaa

SEQ ID NO: 79130 - DNA, 40 bp, Homo sapiens
tagtcctgaaaaagataatgttatgtgtatgtgtgagaat

SEQ ID NO: 79131 - DNA, 40 bp, Homo sapiens
attctcacacatacacataacattatctttttcaggacta

SEQ ID NO: 79132 - DNA, 40 bp, Homo sapiens
agtcctgaaaaagataatgttatgtgtatgtgtgagaatg

SEQ ID NO: 79133 - DNA, 40 bp, Homo sapiens
cattctcacacatacacataacattatctttttcaggact

SEQ ID NO: 79134 - DNA, 40 bp, Homo sapiens
gtcctgaaaaagataatgttatgtgtatgtgtgagaatga

SEQ ID NO: 79135 - DNA, 40 bp, Homo sapiens
tcattctcacacatacacataacattatctttttcaggac

SEQ ID NO: 79136 - DNA, 40 bp, Homo sapiens
tcctgaaaaagataatgttatgtgtatgtgtgagaatgat

SEQ ID NO: 79137 - DNA, 40 bp, Homo sapiens
atcattctcacacatacacataacattatctttttcagga

SEQ ID NO: 79138 - DNA, 40 bp, Homo sapiens
cctgaaaaagataatgttatgtgtatgtgtgagaatgatt

SEQ ID NO: 79139 - DNA, 40 bp, Homo sapiens
aatcattctcacacatacacataacattatctttttcagg

SEQ ID NO: 79140 - DNA, 40 bp, Homo sapiens
ctgaaaaagataatgttatgtgtatgtgtgagaatgatta

SEQ ID NO: 79141 - DNA, 40 bp, Homo sapiens
taatcattctcacacatacacataacattatctttttcag

SEQ ID NO: 79142 - DNA, 40 bp, Homo sapiens
tgaaaaagataatgttatgtgtatgtgtgagaatgattag

SEQ ID NO: 79143 - DNA, 40 bp, Homo sapiens
ctaatcattctcacacatacacataacattatctttttca

SEQ ID NO: 79144 - DNA, 40 bp, Homo sapiens
gaaaaagataatgttatgtgtatgtgtgagaatgattagt

SEQ ID NO: 79145 - DNA, 40 bp, Homo sapiens
actaatcattctcacacatacacataacattatctttttc

SEQ ID NO: 79146 - DNA, 40 bp, Homo sapiens
aaaaagataatgttatgtgtatgtgtgagaatgattagtt

SEQ ID NO: 79147 - DNA, 40 bp, Homo sapiens
aactaatcattctcacacatacacataacattatcttttt

SEQ ID NO: 79148 - DNA, 40 bp, Homo sapiens
aaaagataatgttatgtgtatgtgtgagaatgattagttc

SEQ ID NO: 79149 - DNA, 40 bp, Homo sapiens
gaactaatcattctcacacatacacataacattatctttt

SEQ ID NO: 79150 - DNA, 40 bp, Homo sapiens
aaagataatgttatgtgtatgtgtgagaatgattagttct

SEQ ID NO: 79151 - DNA, 40 bp, Homo sapiens
agaactaatcattctcacacatacacataacattatcttt

SEQ ID NO: 79152 - DNA, 40 bp, Homo sapiens
aagataatgttatgtgtatgtgtgagaatgattagttctc

SEQ ID NO: 79153 - DNA, 40 bp, Homo sapiens
gagaactaatcattctcacacatacacataacattatctt

SEQ ID NO: 79154 - DNA, 40 bp, Homo sapiens
agataatgttatgtgtatgtgtgagaatgattagttctca

SEQ ID NO: 79155 - DNA, 40 bp, Homo sapiens
tgagaactaatcattctcacacatacacataacattatct

SEQ ID NO: 79156 - DNA, 40 bp, Homo sapiens
gataatgttatgtgtatgtgtgagaatgattagttctcat

SEQ ID NO: 79157 - DNA, 40 bp, Homo sapiens
atgagaactaatcattctcacacatacacataacattatc

SEQ ID NO: 79158 - DNA, 40 bp, Homo sapiens
ataatgttatgtgtatgtgtgagaatgattagttctcata

SEQ ID NO: 79159 - DNA, 40 bp, Homo sapiens
tatgagaactaatcattctcacacatacacataacattat

SEQ ID NO: 79160 - DNA, 40 bp, Homo sapiens
taatgttatgtgtatgtgtgagaatgattagttctcatat

SEQ ID NO: 79161 - DNA, 40 bp, Homo sapiens
atatgagaactaatcattctcacacatacacataacatta

SEQ ID NO: 79162 - DNA, 40 bp, Homo sapiens
aatgttatgtgtatgtgtgagaatgattagttctcatatg

SEQ ID NO: 79163 - DNA, 40 bp, Homo sapiens
catatgagaactaatcattctcacacatacacataacatt

SEQ ID NO: 79164 - DNA, 40 bp, Homo sapiens
atgttatgtgtatgtgtgagaatgattagttctcatatga

SEQ ID NO: 79165 - DNA, 40 bp, Homo sapiens
tcatatgagaactaatcattctcacacatacacataacat

SEQ ID NO: 79166 - DNA, 40 bp, Homo sapiens
tgttatgtgtatgtgtgagaatgattagttctcatatgag

SEQ ID NO: 79167 - DNA, 40 bp, Homo sapiens
ctcatatgagaactaatcattctcacacatacacataaca

SEQ ID NO: 79168 - DNA, 40 bp, Homo sapiens
gttatgtgtatgtgtgagaatgattagttctcatatgaga

SEQ ID NO: 79169 - DNA, 40 bp, Homo sapiens
tctcatatgagaactaatcattctcacacatacacataac

SEQ ID NO: 79170 - DNA, 40 bp, Homo sapiens
ttatgtgtatgtgtgagaatgattagttctcatatgagaa

SEQ ID NO: 79171 - DNA, 40 bp, Homo sapiens
ttctcatatgagaactaatcattctcacacatacacataa

SEQ ID NO: 79172 - DNA, 40 bp, Homo sapiens
tatgtgtatgtgtgagaatgattagttctcatatgagaaa

SEQ ID NO: 79173 - DNA, 40 bp, Homo sapiens
tttctcatatgagaactaatcattctcacacatacacata

SEQ ID NO: 79174 - DNA, 40 bp, Homo sapiens
atgtgtatgtgtgagaatgattagttctcatatgagaaaa

SEQ ID NO: 79175 - DNA, 40 bp, Homo sapiens
ttttctcatatgagaactaatcattctcacacatacacat

SEQ ID NO: 79176 - DNA, 40 bp, Homo sapiens
tgtgtatgtgtgagaatgattagttctcatatgagaaaaa

SEQ ID NO: 79177 - DNA, 40 bp, Homo sapiens
tttttctcatatgagaactaatcattctcacacatacaca

SEQ ID NO: 79178 - DNA, 40 bp, Homo sapiens
gtgtatgtgtgagaatgattagttctcatatgagaaaaaa

SEQ ID NO: 79179 - DNA, 40 bp, Homo sapiens
ttttttctcatatgagaactaatcattctcacacatacac

SEQ ID NO: 79180 - DNA, 40 bp, Homo sapiens
tgtatgtgtgagaatgattagttctcatatgagaaaaaaa

SEQ ID NO: 79181 - DNA, 40 bp, Homo sapiens
tttttttctcatatgagaactaatcattctcacacataca

SEQ ID NO: 79182 - DNA, 40 bp, Homo sapiens
gtatgtgtgagaatgattagttctcatatgagaaaaaaag

SEQ ID NO: 79183 - DNA, 40 bp, Homo sapiens
ctttttttctcatatgagaactaatcattctcacacatac

SEQ ID NO: 79184 - DNA, 40 bp, Homo sapiens
tatgtgtgagaatgattagttctcatatgagaaaaaaaga

SEQ ID NO: 79185 - DNA, 40 bp, Homo sapiens
tctttttttctcatatgagaactaatcattctcacacata

SEQ ID NO: 79186 - DNA, 40 bp, Homo sapiens
atgtgtgagaatgattagttctcatatgagaaaaaaagaa

SEQ ID NO: 79187 - DNA, 40 bp, Homo sapiens
ttctttttttctcatatgagaactaatcattctcacacat

SEQ ID NO: 79188 - DNA, 40 bp, Homo sapiens
tgtgtgagaatgattagttctcatatgagaaaaaaagaat

SEQ ID NO: 79189 - DNA, 40 bp, Homo sapiens
attctttttttctcatatgagaactaatcattctcacaca

SEQ ID NO: 79190 - DNA, 40 bp, Homo sapiens
gtgtgagaatgattagttctcatatgagaaaaaaagaatt

SEQ ID NO: 79191 - DNA, 40 bp, Homo sapiens
aattctttttttctcatatgagaactaatcattctcacac

SEQ ID NO: 79192 - DNA, 40 bp, Homo sapiens
tgtgagaatgattagttctcatatgagaaaaaaagaattc

SEQ ID NO: 79193 - DNA, 40 bp, Homo sapiens
gaattctttttttctcatatgagaactaatcattctcaca

SEQ ID NO: 79194 - DNA, 40 bp, Homo sapiens
gtgagaatgattagttctcatatgagaaaaaaagaattca

SEQ ID NO: 79195 - DNA, 40 bp, Homo sapiens
tgaattctttttttctcatatgagaactaatcattctcac

SEQ ID NO: 79196 - DNA, 40 bp, Homo sapiens
tgagaatgattagttctcatatgagaaaaaaagaattcat

SEQ ID NO: 79197 - DNA, 40 bp, Homo sapiens
atgaattctttttttctcatatgagaactaatcattctca

SEQ ID NO: 79198 - DNA, 40 bp, Homo sapiens
gagaatgattagttctcatatgagaaaaaaagaattcatt

SEQ ID NO: 79199 - DNA, 40 bp, Homo sapiens
aatgaattctttttttctcatatgagaactaatcattctc

SEQ ID NO: 79200 - DNA, 40 bp, Homo sapiens
agaatgattagttctcatatgagaaaaaaagaattcattg

SEQ ID NO: 79201 - DNA, 40 bp, Homo sapiens
caatgaattctttttttctcatatgagaactaatcattct

SEQ ID NO: 79202 - DNA, 40 bp, Homo sapiens
gaatgattagttctcatatgagaaaaaaagaattcattgc

SEQ ID NO: 79203 - DNA, 40 bp, Homo sapiens
gcaatgaattctttttttctcatatgagaactaatcattc

SEQ ID NO: 79204 - DNA, 40 bp, Homo sapiens
aatgattagttctcatatgagaaaaaaagaattcattgct

SEQ ID NO: 79205 - DNA, 40 bp, Homo sapiens
agcaatgaattctttttttctcatatgagaactaatcatt

SEQ ID NO: 79206 - DNA, 40 bp, Homo sapiens
atgattagttctcatatgagaaaaaaagaattcattgctc

SEQ ID NO: 79207 - DNA, 40 bp, Homo sapiens
gagcaatgaattctttttttctcatatgagaactaatcat

SEQ ID NO: 79208 - DNA, 40 bp, Homo sapiens
tgattagttctcatatgagaaaaaaagaattcattgctct

SEQ ID NO: 79209 - DNA, 40 bp, Homo sapiens
agagcaatgaattctttttttctcatatgagaactaatca

SEQ ID NO: 79210 - DNA, 40 bp, Homo sapiens
gattagttctcatatgagaaaaaaagaattcattgctctg

SEQ ID NO: 79211 - DNA, 40 bp, Homo sapiens
cagagcaatgaattctttttttctcatatgagaactaatc

SEQ ID NO: 79212 - DNA, 40 bp, Homo sapiens
attagttctcatatgagaaaaaaagaattcattgctctgt

SEQ ID NO: 79213 - DNA, 40 bp, Homo sapiens
acagagcaatgaattctttttttctcatatgagaactaat

SEQ ID NO: 79214 - DNA, 40 bp, Homo sapiens
ttagttctcatatgagaaaaaaagaattcattgctctgtg

SEQ ID NO: 79215 - DNA, 40 bp, Homo sapiens
cacagagcaatgaattctttttttctcatatgagaactaa

SEQ ID NO: 79216 - DNA, 40 bp, Homo sapiens
tagttctcatatgagaaaaaaagaattcattgctctgtgt

SEQ ID NO: 79217 - DNA, 40 bp, Homo sapiens
acacagagcaatgaattctttttttctcatatgagaacta

SEQ ID NO: 79218 - DNA, 40 bp, Homo sapiens
agttctcatatgagaaaaaaagaattcattgctctgtgta

SEQ ID NO: 79219 - DNA, 40 bp, Homo sapiens
tacacagagcaatgaattctttttttctcatatgagaact

SEQ ID NO: 79220 - DNA, 40 bp, Homo sapiens
gttctcatatgagaaaaaaagaattcattgctctgtgtag

SEQ ID NO: 79221 - DNA, 40 bp, Homo sapiens
ctacacagagcaatgaattctttttttctcatatgagaac

SEQ ID NO: 79222 - DNA, 40 bp, Homo sapiens
ttctcatatgagaaaaaaagaattcattgctctgtgtagg

SEQ ID NO: 79223 - DNA, 40 bp, Homo sapiens
cctacacagagcaatgaattctttttttctcatatgagaa

SEQ ID NO: 79224 - DNA, 40 bp, Homo sapiens
tctcatatgagaaaaaaagaattcattgctctgtgtaggt

SEQ ID NO: 79225 - DNA, 40 bp, Homo sapiens
acctacacagagcaatgaattctttttttctcatatgaga

SEQ ID NO: 79226 - DNA, 40 bp, Homo sapiens
ctcatatgagaaaaaaagaattcattgctctgtgtaggtt

SEQ ID NO: 79227 - DNA, 40 bp, Homo sapiens
aacctacacagagcaatgaattctttttttctcatatgag

SEQ ID NO: 79228 - DNA, 40 bp, Homo sapiens
tcatatgagaaaaaaagaattcattgctctgtgtaggttg

SEQ ID NO: 79229 - DNA, 40 bp, Homo sapiens
caacctacacagagcaatgaattctttttttctcatatga

SEQ ID NO: 79230 - DNA, 40 bp, Homo sapiens
catatgagaaaaaaagaattcattgctctgtgtaggttgt

SEQ ID NO: 79231 - DNA, 40 bp, Homo sapiens
acaacctacacagagcaatgaattctttttttctcatatg

SEQ ID NO: 79232 - DNA, 40 bp, Homo sapiens
atatgagaaaaaaagaattcattgctctgtgtaggttgtg

SEQ ID NO: 79233 - DNA, 40 bp, Homo sapiens
cacaacctacacagagcaatgaattctttttttctcatat

SEQ ID NO: 79234 - DNA, 40 bp, Homo sapiens
tatgagaaaaaaagaattcattgctctgtgtaggttgtga

SEQ ID NO: 79235 - DNA, 40 bp, Homo sapiens
tcacaacctacacagagcaatgaattctttttttctcata

SEQ ID NO: 79236 - DNA, 40 bp, Homo sapiens
atgagaaaaaaagaattcattgctctgtgtaggttgtgac

SEQ ID NO: 79237 - DNA, 40 bp, Homo sapiens
gtcacaacctacacagagcaatgaattctttttttctcat

SEQ ID NO: 79238 - DNA, 40 bp, Homo sapiens
tgagaaaaaaagaattcattgctctgtgtaggttgtgaca

SEQ ID NO: 79239 - DNA, 40 bp, Homo sapiens
tgtcacaacctacacagagcaatgaattctttttttctca

SEQ ID NO: 79240 - DNA, 40 bp, Homo sapiens
gagaaaaaaagaattcattgctctgtgtaggttgtgacat

SEQ ID NO: 79241 - DNA, 40 bp, Homo sapiens
atgtcacaacctacacagagcaatgaattctttttttctc

SEQ ID NO: 79242 - DNA, 40 bp, Homo sapiens
agaaaaaaagaattcattgctctgtgtaggttgtgacatt

SEQ ID NO: 79243 - DNA, 40 bp, Homo sapiens
aatgtcacaacctacacagagcaatgaattctttttttct

SEQ ID NO: 79244 - DNA, 40 bp, Homo sapiens
gaaaaaaagaattcattgctctgtgtaggttgtgacattt

SEQ ID NO: 79245 - DNA, 40 bp, Homo sapiens
aaatgtcacaacctacacagagcaatgaattctttttttc

SEQ ID NO: 79246 - DNA, 40 bp, Homo sapiens
aaaaaaagaattcattgctctgtgtaggttgtgacatttc

SEQ ID NO: 79247 - DNA, 40 bp, Homo sapiens
gaaatgtcacaacctacacagagcaatgaattcttttttt

SEQ ID NO: 79248 - DNA, 40 bp, Homo sapiens
aaaaaagaattcattgctctgtgtaggttgtgacatttcc

SEQ ID NO: 79249 - DNA, 40 bp, Homo sapiens
ggaaatgtcacaacctacacagagcaatgaattctttttt

SEQ ID NO: 79250 - DNA, 40 bp, Homo sapiens
aaaaagaattcattgctctgtgtaggttgtgacatttcct

SEQ ID NO: 79251 - DNA, 40 bp, Homo sapiens
aggaaatgtcacaacctacacagagcaatgaattcttttt

SEQ ID NO: 79252 - DNA, 40 bp, Homo sapiens
aaaagaattcattgctctgtgtaggttgtgacatttcctt

SEQ ID NO: 79253 - DNA, 40 bp, Homo sapiens
aaggaaatgtcacaacctacacagagcaatgaattctttt

SEQ ID NO: 79254 - DNA, 40 bp, Homo sapiens
aaagaattcattgctctgtgtaggttgtgacatttccttc

SEQ ID NO: 79255 - DNA, 40 bp, Homo sapiens
gaaggaaatgtcacaacctacacagagcaatgaattcttt

SEQ ID NO: 79256 - DNA, 40 bp, Homo sapiens
aagaattcattgctctgtgtaggttgtgacatttccttca

SEQ ID NO: 79257 - DNA, 40 bp, Homo sapiens
tgaaggaaatgtcacaacctacacagagcaatgaattctt

SEQ ID NO: 79258 - DNA, 40 bp, Homo sapiens
agaattcattgctctgtgtaggttgtgacatttccttcac

SEQ ID NO: 79259 - DNA, 40 bp, Homo sapiens
gtgaaggaaatgtcacaacctacacagagcaatgaattct

SEQ ID NO: 79260 - DNA, 40 bp, Homo sapiens
gaattcattgctctgtgtaggttgtgacatttccttcacg

SEQ ID NO: 79261 - DNA, 40 bp, Homo sapiens
cgtgaaggaaatgtcacaacctacacagagcaatgaattc

SEQ ID NO: 79262 - DNA, 40 bp, Homo sapiens
aattcattgctctgtgtaggttgtgacatttccttcacga

SEQ ID NO: 79263 - DNA, 40 bp, Homo sapiens
tcgtgaaggaaatgtcacaacctacacagagcaatgaatt

SEQ ID NO: 79264 - DNA, 40 bp, Homo sapiens
attcattgctctgtgtaggttgtgacatttccttcacgat

SEQ ID NO: 79265 - DNA, 40 bp, Homo sapiens
atcgtgaaggaaatgtcacaacctacacagagcaatgaat

SEQ ID NO: 79266 - DNA, 40 bp, Homo sapiens
ttcattgctctgtgtaggttgtgacatttccttcacgatt

SEQ ID NO: 79267 - DNA, 40 bp, Homo sapiens
aatcgtgaaggaaatgtcacaacctacacagagcaatgaa

SEQ ID NO: 79268 - DNA, 40 bp, Homo sapiens
tcattgctctgtgtaggttgtgacatttccttcacgattg

SEQ ID NO: 79269 - DNA, 40 bp, Homo sapiens
caatcgtgaaggaaatgtcacaacctacacagagcaatga

SEQ ID NO: 79270 - DNA, 40 bp, Homo sapiens
cattgctctgtgtaggttgtgacatttccttcacgattga

SEQ ID NO: 79271 - DNA, 40 bp, Homo sapiens
tcaatcgtgaaggaaatgtcacaacctacacagagcaatg

SEQ ID NO: 79272 - DNA, 40 bp, Homo sapiens
attgctctgtgtaggttgtgacatttccttcacgattgaa

SEQ ID NO: 79273 - DNA, 40 bp, Homo sapiens
ttcaatcgtgaaggaaatgtcacaacctacacagagcaat

SEQ ID NO: 79274 - DNA, 40 bp, Homo sapiens
ttgctctgtgtaggttgtgacatttccttcacgattgaaa

SEQ ID NO: 79275 - DNA, 40 bp, Homo sapiens
tttcaatcgtgaaggaaatgtcacaacctacacagagcaa

SEQ ID NO: 79276 - DNA, 40 bp, Homo sapiens
tgctctgtgtaggttgtgacatttccttcacgattgaaat

SEQ ID NO: 79277 - DNA, 40 bp, Homo sapiens
atttcaatcgtgaaggaaatgtcacaacctacacagagca

SEQ ID NO: 79278 - DNA, 40 bp, Homo sapiens
gctctgtgtaggttgtgacatttccttcacgattgaaatt

SEQ ID NO: 79279 - DNA, 40 bp, Homo sapiens
aatttcaatcgtgaaggaaatgtcacaacctacacagagc

SEQ ID NO: 79280 - DNA, 40 bp, Homo sapiens
ctctgtgtaggttgtgacatttccttcacgattgaaatta

SEQ ID NO: 79281 - DNA, 40 bp, Homo sapiens
taatttcaatcgtgaaggaaatgtcacaacctacacagag

SEQ ID NO: 79282 - DNA, 40 bp, Homo sapiens
tctgtgtaggttgtgacatttccttcacgattgaaattaa

SEQ ID NO: 79283 - DNA, 40 bp, Homo sapiens
ttaatttcaatcgtgaaggaaatgtcacaacctacacaga

SEQ ID NO: 79284 - DNA, 40 bp, Homo sapiens
ctgtgtaggttgtgacatttccttcacgattgaaattaat

SEQ ID NO: 79285 - DNA, 40 bp, Homo sapiens
attaatttcaatcgtgaaggaaatgtcacaacctacacag

SEQ ID NO: 79286 - DNA, 40 bp, Homo sapiens
tgtgtaggttgtgacatttccttcacgattgaaattaatt

SEQ ID NO: 79287 - DNA, 40 bp, Homo sapiens
aattaatttcaatcgtgaaggaaatgtcacaacctacaca

SEQ ID NO: 79288 - DNA, 40 bp, Homo sapiens
gtgtaggttgtgacatttccttcacgattgaaattaatta

SEQ ID NO: 79289 - DNA, 40 bp, Homo sapiens
taattaatttcaatcgtgaaggaaatgtcacaacctacac

SEQ ID NO: 79290 - DNA, 40 bp, Homo sapiens
tgtaggttgtgacatttccttcacgattgaaattaattaa

SEQ ID NO: 79291 - DNA, 40 bp, Homo sapiens
ttaattaatttcaatcgtgaaggaaatgtcacaacctaca

SEQ ID NO: 79292 - DNA, 40 bp, Homo sapiens
gtaggttgtgacatttccttcacgattgaaattaattaat

SEQ ID NO: 79293 - DNA, 40 bp, Homo sapiens
attaattaatttcaatcgtgaaggaaatgtcacaacctac

SEQ ID NO: 79294 - DNA, 40 bp, Homo sapiens
taggttgtgacatttccttcacgattgaaattaattaatt

SEQ ID NO: 79295 - DNA, 40 bp, Homo sapiens
aattaattaatttcaatcgtgaaggaaatgtcacaaccta

SEQ ID NO: 79296 - DNA, 40 bp, Homo sapiens
aggttgtgacatttccttcacgattgaaattaattaattt

SEQ ID NO: 79297 - DNA, 40 bp, Homo sapiens
aaattaattaatttcaatcgtgaaggaaatgtcacaacct

SEQ ID NO: 79298 - DNA, 40 bp, Homo sapiens
ggttgtgacatttccttcacgattgaaattaattaatttt

SEQ ID NO: 79299 - DNA, 40 bp, Homo sapiens
aaaattaattaatttcaatcgtgaaggaaatgtcacaacc

SEQ ID NO: 79300 - DNA, 40 bp, Homo sapiens
gttgtgacatttccttcacgattgaaattaattaattttt

SEQ ID NO: 79301 - DNA, 40 bp, Homo sapiens
aaaaattaattaatttcaatcgtgaaggaaatgtcacaac

SEQ ID NO: 79302 - DNA, 40 bp, Homo sapiens
ttgtgacatttccttcacgattgaaattaattaatttttt

SEQ ID NO: 79303 - DNA, 40 bp, Homo sapiens
aaaaaattaattaatttcaatcgtgaaggaaatgtcacaa

SEQ ID NO: 79304 - DNA, 40 bp, Homo sapiens
tgtgacatttccttcacgattgaaattaattaattttttt

SEQ ID NO: 79305 - DNA, 40 bp, Homo sapiens
aaaaaaattaattaatttcaatcgtgaaggaaatgtcaca

SEQ ID NO: 79306 - DNA, 40 bp, Homo sapiens
gtgacatttccttcacgattgaaattaattaatttttttt

SEQ ID NO: 79307 - DNA, 40 bp, Homo sapiens
aaaaaaaattaattaatttcaatcgtgaaggaaatgtcac

SEQ ID NO: 79308 - DNA, 40 bp, Homo sapiens
tgacatttccttcacgattgaaattaattaattttttttt

SEQ ID NO: 79309 - DNA, 40 bp, Homo sapiens
aaaaaaaaattaattaatttcaatcgtgaaggaaatgtca

SEQ ID NO: 79310 - DNA, 40 bp, Homo sapiens
gacatttccttcacgattgaaattaattaattttttttta

SEQ ID NO: 79311 - DNA, 40 bp, Homo sapiens
taaaaaaaaattaattaatttcaatcgtgaaggaaatgtc

SEQ ID NO: 79312 - DNA, 40 bp, Homo sapiens
acatttccttcacgattgaaattaattaatttttttttat

SEQ ID NO: 79313 - DNA, 40 bp, Homo sapiens
ataaaaaaaaattaattaatttcaatcgtgaaggaaatgt

SEQ ID NO: 79314 - DNA, 40 bp, Homo sapiens
catttccttcacgattgaaattaattaatttttttttatt

SEQ ID NO: 79315 - DNA, 40 bp, Homo sapiens
aataaaaaaaaattaattaatttcaatcgtgaaggaaatg

SEQ ID NO: 79316 - DNA, 40 bp, Homo sapiens
atttccttcacgattgaaattaattaatttttttttatta

SEQ ID NO: 79317 - DNA, 40 bp, Homo sapiens
taataaaaaaaaattaattaatttcaatcgtgaaggaaat

SEQ ID NO: 79318 - DNA, 40 bp, Homo sapiens
tttccttcacgattgaaattaattaatttttttttattac

SEQ ID NO: 79319 - DNA, 40 bp, Homo sapiens
gtaataaaaaaaaattaattaatttcaatcgtgaaggaaa

SEQ ID NO: 79320 - DNA, 40 bp, Homo sapiens
ttccttcacgattgaaattaattaatttttttttattact

SEQ ID NO: 79321 - DNA, 40 bp, Homo sapiens
agtaataaaaaaaaattaattaatttcaatcgtgaaggaa

SEQ ID NO: 79322 - DNA, 40 bp, Homo sapiens
tccttcacgattgaaattaattaatttttttttattactt

SEQ ID NO: 79323 - DNA, 40 bp, Homo sapiens
aagtaataaaaaaaaattaattaatttcaatcgtgaagga

SEQ ID NO: 79324 - DNA, 40 bp, Homo sapiens
ccttcacgattgaaattaattaatttttttttattactta

SEQ ID NO: 79325 - DNA, 40 bp, Homo sapiens
taagtaataaaaaaaaattaattaatttcaatcgtgaagg

SEQ ID NO: 79326 - DNA, 40 bp, Homo sapiens
cttcacgattgaaattaattaatttttttttattacttat

SEQ ID NO: 79327 - DNA, 40 bp, Homo sapiens
ataagtaataaaaaaaaattaattaatttcaatcgtgaag

SEQ ID NO: 79328 - DNA, 40 bp, Homo sapiens
ttcacgattgaaattaattaatttttttttattacttatt

SEQ ID NO: 79329 - DNA, 40 bp, Homo sapiens
aataagtaataaaaaaaaattaattaatttcaatcgtgaa

SEQ ID NO: 79330 - DNA, 40 bp, Homo sapiens
tcacgattgaaattaattaatttttttttattacttattt

SEQ ID NO: 79331 - DNA, 40 bp, Homo sapiens
aaataagtaataaaaaaaaattaattaatttcaatcgtga

SEQ ID NO: 79332 - DNA, 40 bp, Homo sapiens
cacgattgaaattaattaatttttttttattacttattta

SEQ ID NO: 79333 - DNA, 40 bp, Homo sapiens
taaataagtaataaaaaaaaattaattaatttcaatcgtg

SEQ ID NO: 79334 - DNA, 40 bp, Homo sapiens
acgattgaaattaattaatttttttttattacttatttat

SEQ ID NO: 79335 - DNA, 40 bp, Homo sapiens
ataaataagtaataaaaaaaaattaattaatttcaatcgt

SEQ ID NO: 79336 - DNA, 40 bp, Homo sapiens
cgattgaaattaattaatttttttttattacttatttatt

SEQ ID NO: 79337 - DNA, 40 bp, Homo sapiens
aataaataagtaataaaaaaaaattaattaatttcaatcg

SEQ ID NO: 79338 - DNA, 40 bp, Homo sapiens
gattgaaattaattaatttttttttattacttatttattt

SEQ ID NO: 79339 - DNA, 40 bp, Homo sapiens
aaataaataagtaataaaaaaaaattaattaatttcaatc

SEQ ID NO: 79340 - DNA, 40 bp, Homo sapiens
attgaaattaattaatttttttttattacttatttatttt

SEQ ID NO: 79341 - DNA, 40 bp, Homo sapiens
aaaataaataagtaataaaaaaaaattaattaatttcaat

SEQ ID NO: 79342 - DNA, 40 bp, Homo sapiens
ttgaaattaattaatttttttttattacttatttattttt

SEQ ID NO: 79343 - DNA, 40 bp, Homo sapiens
aaaaataaataagtaataaaaaaaaattaattaatttcaa

SEQ ID NO: 79344 - DNA, 40 bp, Homo sapiens
tgaaattaattaatttttttttattacttatttattttta

SEQ ID NO: 79345 - DNA, 40 bp, Homo sapiens
taaaaataaataagtaataaaaaaaaattaattaatttca

SEQ ID NO: 79346 - DNA, 40 bp, Homo sapiens
gaaattaattaatttttttttattacttatttatttttaa

SEQ ID NO: 79347 - DNA, 40 bp, Homo sapiens
ttaaaaataaataagtaataaaaaaaaattaattaatttc

SEQ ID NO: 79348 - DNA, 40 bp, Homo sapiens
aaattaattaatttttttttattacttatttatttttaaa

SEQ ID NO: 79349 - DNA, 40 bp, Homo sapiens
tttaaaaataaataagtaataaaaaaaaattaattaattt

SEQ ID NO: 79350 - DNA, 40 bp, Homo sapiens
aattaattaatttttttttattacttatttatttttaaaa

SEQ ID NO: 79351 - DNA, 40 bp, Homo sapiens
ttttaaaaataaataagtaataaaaaaaaattaattaatt

SEQ ID NO: 79352 - DNA, 40 bp, Homo sapiens
attaattaatttttttttattacttatttatttttaaaat

SEQ ID NO: 79353 - DNA, 40 bp, Homo sapiens
attttaaaaataaataagtaataaaaaaaaattaattaat

SEQ ID NO: 79354 - DNA, 40 bp, Homo sapiens
ttaattaatttttttttattacttatttatttttaaaata

SEQ ID NO: 79355 - DNA, 40 bp, Homo sapiens
tattttaaaaataaataagtaataaaaaaaaattaattaa

SEQ ID NO: 79356 - DNA, 40 bp, Homo sapiens
taattaatttttttttattacttatttatttttaaaatag

SEQ ID NO: 79357 - DNA, 40 bp, Homo sapiens
ctattttaaaaataaataagtaataaaaaaaaattaatta

SEQ ID NO: 79358 - DNA, 40 bp, Homo sapiens
aattaatttttttttattacttatttatttttaaaataga

SEQ ID NO: 79359 - DNA, 40 bp, Homo sapiens
tctattttaaaaataaataagtaataaaaaaaaattaatt

SEQ ID NO: 79360 - DNA, 40 bp, Homo sapiens
attaatttttttttattacttatttatttttaaaatagag

SEQ ID NO: 79361 - DNA, 40 bp, Homo sapiens
ctctattttaaaaataaataagtaataaaaaaaaattaat

SEQ ID NO: 79362 - DNA, 40 bp, Homo sapiens
ttaatttttttttattacttatttatttttaaaatagaga

SEQ ID NO: 79363 - DNA, 40 bp, Homo sapiens
tctctattttaaaaataaataagtaataaaaaaaaattaa

SEQ ID NO: 79364 - DNA, 40 bp, Homo sapiens
taatttttttttattacttatttatttttaaaatagagac

SEQ ID NO: 79365 - DNA, 40 bp, Homo sapiens
gtctctattttaaaaataaataagtaataaaaaaaaatta

SEQ ID NO: 79366 - DNA, 40 bp, Homo sapiens
aatttttttttattacttatttatttttaaaatagagaca

SEQ ID NO: 79367 - DNA, 40 bp, Homo sapiens
tgtctctattttaaaaataaataagtaataaaaaaaaatt

SEQ ID NO: 79368 - DNA, 40 bp, Homo sapiens
atttttttttattacttatttatttttaaaatagagacag

SEQ ID NO: 79369 - DNA, 40 bp, Homo sapiens
ctgtctctattttaaaaataaataagtaataaaaaaaaat

SEQ ID NO: 79370 - DNA, 40 bp, Homo sapiens
tttttttttattacttatttatttttaaaatagagacagg

SEQ ID NO: 79371 - DNA, 40 bp, Homo sapiens
cctgtctctattttaaaaataaataagtaataaaaaaaaa

SEQ ID NO: 79372 - DNA, 40 bp, Homo sapiens
ttttttttattacttatttatttttaaaatagagacaggt

SEQ ID NO: 79373 - DNA, 40 bp, Homo sapiens
acctgtctctattttaaaaataaataagtaataaaaaaaa

SEQ ID NO: 79374 - DNA, 40 bp, Homo sapiens
tttttttattacttatttatttttaaaatagagacaggtt

SEQ ID NO: 79375 - DNA, 40 bp, Homo sapiens
aacctgtctctattttaaaaataaataagtaataaaaaaa

SEQ ID NO: 79376 - DNA, 40 bp, Homo sapiens
ttttttattacttatttatttttaaaatagagacaggttc

SEQ ID NO: 79377 - DNA, 40 bp, Homo sapiens
gaacctgtctctattttaaaaataaataagtaataaaaaa

SEQ ID NO: 79378 - DNA, 40 bp, Homo sapiens
tttttattacttatttatttttaaaatagagacaggttct

SEQ ID NO: 79379 - DNA, 40 bp, Homo sapiens
agaacctgtctctattttaaaaataaataagtaataaaaa

SEQ ID NO: 79380 - DNA, 40 bp, Homo sapiens
ttttattacttatttatttttaaaatagagacaggttctt

SEQ ID NO: 79381 - DNA, 40 bp, Homo sapiens
aagaacctgtctctattttaaaaataaataagtaataaaa

SEQ ID NO: 79382 - DNA, 40 bp, Homo sapiens
tttattacttatttatttttaaaatagagacaggttcttg

SEQ ID NO: 79383 - DNA, 40 bp, Homo sapiens
caagaacctgtctctattttaaaaataaataagtaataaa

SEQ ID NO: 79384 - DNA, 40 bp, Homo sapiens
ttattacttatttatttttaaaatagagacaggttcttgc

SEQ ID NO: 79385 - DNA, 40 bp, Homo sapiens
gcaagaacctgtctctattttaaaaataaataagtaataa

SEQ ID NO: 79386 - DNA, 40 bp, Homo sapiens
tattacttatttatttttaaaatagagacaggttcttgct

SEQ ID NO: 79387 - DNA, 40 bp, Homo sapiens
agcaagaacctgtctctattttaaaaataaataagtaata

SEQ ID NO: 79388 - DNA, 40 bp, Homo sapiens
attacttatttatttttaaaatagagacaggttcttgctg

SEQ ID NO: 79389 - DNA, 40 bp, Homo sapiens
cagcaagaacctgtctctattttaaaaataaataagtaat

SEQ ID NO: 79390 - DNA, 40 bp, Homo sapiens
ttacttatttatttttaaaatagagacaggttcttgctgt

SEQ ID NO: 79391 - DNA, 40 bp, Homo sapiens
acagcaagaacctgtctctattttaaaaataaataagtaa

SEQ ID NO: 79392 - DNA, 40 bp, Homo sapiens
tacttatttatttttaaaatagagacaggttcttgctgtg

SEQ ID NO: 79393 - DNA, 40 bp, Homo sapiens
cacagcaagaacctgtctctattttaaaaataaataagta

SEQ ID NO: 79394 - DNA, 40 bp, Homo sapiens
acttatttatttttaaaatagagacaggttcttgctgtgt

SEQ ID NO: 79395 - DNA, 40 bp, Homo sapiens
acacagcaagaacctgtctctattttaaaaataaataagt

SEQ ID NO: 79396 - DNA, 40 bp, Homo sapiens
cttatttatttttaaaatagagacaggttcttgctgtgtt

SEQ ID NO: 79397 - DNA, 40 bp, Homo sapiens
aacacagcaagaacctgtctctattttaaaaataaataag

SEQ ID NO: 79398 - DNA, 40 bp, Homo sapiens
ttatttatttttaaaatagagacaggttcttgctgtgttg

SEQ ID NO: 79399 - DNA, 40 bp, Homo sapiens
caacacagcaagaacctgtctctattttaaaaataaataa

SEQ ID NO: 79400 - DNA, 40 bp, Homo sapiens
tatttatttttaaaatagagacaggttcttgctgtgttgc

SEQ ID NO: 79401 - DNA, 40 bp, Homo sapiens
gcaacacagcaagaacctgtctctattttaaaaataaata

SEQ ID NO: 79402 - DNA, 40 bp, Homo sapiens
atttatttttaaaatagagacaggttcttgctgtgttgcc

SEQ ID NO: 79403 - DNA, 40 bp, Homo sapiens
ggcaacacagcaagaacctgtctctattttaaaaataaat

SEQ ID NO: 79404 - DNA, 40 bp, Homo sapiens
tttatttttaaaatagagacaggttcttgctgtgttgccc

SEQ ID NO: 79405 - DNA, 40 bp, Homo sapiens
gggcaacacagcaagaacctgtctctattttaaaaataaa

SEQ ID NO: 79406 - DNA, 40 bp, Homo sapiens
ttatttttaaaatagagacaggttcttgctgtgttgccca

SEQ ID NO: 79407 - DNA, 40 bp, Homo sapiens
tgggcaacacagcaagaacctgtctctattttaaaaataa

SEQ ID NO: 79408 - DNA, 40 bp, Homo sapiens
tatttttaaaatagagacaggttcttgctgtgttgcccag

SEQ ID NO: 79409 - DNA, 40 bp, Homo sapiens
ctgggcaacacagcaagaacctgtctctattttaaaaata

SEQ ID NO: 79410 - DNA, 40 bp, Homo sapiens
atttttaaaatagagacaggttcttgctgtgttgcccagg

SEQ ID NO: 79411 - DNA, 40 bp, Homo sapiens
cctgggcaacacagcaagaacctgtctctattttaaaaat

SEQ ID NO: 79412 - DNA, 40 bp, Homo sapiens
tttttaaaatagagacaggttcttgctgtgttgcccaggc

SEQ ID NO: 79413 - DNA, 40 bp, Homo sapiens
gcctgggcaacacagcaagaacctgtctctattttaaaaa

SEQ ID NO: 79414 - DNA, 40 bp, Homo sapiens
ttttaaaatagagacaggttcttgctgtgttgcccaggct

SEQ ID NO: 79415 - DNA, 40 bp, Homo sapiens
agcctgggcaacacagcaagaacctgtctctattttaaaa

SEQ ID NO: 79416 - DNA, 40 bp, Homo sapiens
tttaaaatagagacaggttcttgctgtgttgcccaggctg

SEQ ID NO: 79417 - DNA, 40 bp, Homo sapiens
cagcctgggcaacacagcaagaacctgtctctattttaaa

SEQ ID NO: 79418 - DNA, 40 bp, Homo sapiens
ttaaaatagagacaggttcttgctgtgttgcccaggctgg

SEQ ID NO: 79419 - DNA, 40 bp, Homo sapiens
ccagcctgggcaacacagcaagaacctgtctctattttaa

SEQ ID NO: 79420 - DNA, 40 bp, Homo sapiens
taaaatagagacaggttcttgctgtgttgcccaggctggt

SEQ ID NO: 79421 - DNA, 40 bp, Homo sapiens
accagcctgggcaacacagcaagaacctgtctctatttta

SEQ ID NO: 79422 - DNA, 40 bp, Homo sapiens
aaaatagagacaggttcttgctgtgttgcccaggctggtc

SEQ ID NO: 79423 - DNA, 40 bp, Homo sapiens
gaccagcctgggcaacacagcaagaacctgtctctatttt

SEQ ID NO: 79424 - DNA, 40 bp, Homo sapiens
aaatagagacaggttcttgctgtgttgcccaggctggtct

SEQ ID NO: 79425 - DNA, 40 bp, Homo sapiens
agaccagcctgggcaacacagcaagaacctgtctctattt

SEQ ID NO: 79426 - DNA, 40 bp, Homo sapiens
aatagagacaggttcttgctgtgttgcccaggctggtctc

SEQ ID NO: 79427 - DNA, 40 bp, Homo sapiens
gagaccagcctgggcaacacagcaagaacctgtctctatt

SEQ ID NO: 79428 - DNA, 40 bp, Homo sapiens
atagagacaggttcttgctgtgttgcccaggctggtctca

SEQ ID NO: 79429 - DNA, 40 bp, Homo sapiens
tgagaccagcctgggcaacacagcaagaacctgtctctat

SEQ ID NO: 79430 - DNA, 40 bp, Homo sapiens
tagagacaggttcttgctgtgttgcccaggctggtctcaa

SEQ ID NO: 79431 - DNA, 40 bp, Homo sapiens
ttgagaccagcctgggcaacacagcaagaacctgtctcta

SEQ ID NO: 79432 - DNA, 40 bp, Homo sapiens
agagacaggttcttgctgtgttgcccaggctggtctcaaa

SEQ ID NO: 79433 - DNA, 40 bp, Homo sapiens
tttgagaccagcctgggcaacacagcaagaacctgtctct

SEQ ID NO: 79434 - DNA, 40 bp, Homo sapiens
gagacaggttcttgctgtgttgcccaggctggtctcaaac

SEQ ID NO: 79435 - DNA, 40 bp, Homo sapiens
gtttgagaccagcctgggcaacacagcaagaacctgtctc

SEQ ID NO: 79436 - DNA, 40 bp, Homo sapiens
agacaggttcttgctgtgttgcccaggctggtctcaaact

SEQ ID NO: 79437 - DNA, 40 bp, Homo sapiens
agtttgagaccagcctgggcaacacagcaagaacctgtct

SEQ ID NO: 79438 - DNA, 40 bp, Homo sapiens
gacaggttcttgctgtgttgcccaggctggtctcaaactc

SEQ ID NO: 79439 - DNA, 40 bp, Homo sapiens
gagtttgagaccagcctgggcaacacagcaagaacctgtc

SEQ ID NO: 79440 - DNA, 40 bp, Homo sapiens
acaggttcttgctgtgttgcccaggctggtctcaaactcc

SEQ ID NO: 79441 - DNA, 40 bp, Homo sapiens
ggagtttgagaccagcctgggcaacacagcaagaacctgt

SEQ ID NO: 79442 - DNA, 40 bp, Homo sapiens
caggttcttgctgtgttgcccaggctggtctcaaactcct

SEQ ID NO: 79443 - DNA, 40 bp, Homo sapiens
aggagtttgagaccagcctgggcaacacagcaagaacctg

SEQ ID NO: 79444 - DNA, 40 bp, Homo sapiens
aggttcttgctgtgttgcccaggctggtctcaaactcctg

SEQ ID NO: 79445 - DNA, 40 bp, Homo sapiens
caggagtttgagaccagcctgggcaacacagcaagaacct

SEQ ID NO: 79446 - DNA, 40 bp, Homo sapiens
ggttcttgctgtgttgcccaggctggtctcaaactcctgg

SEQ ID NO: 79447 - DNA, 40 bp, Homo sapiens
ccaggagtttgagaccagcctgggcaacacagcaagaacc

SEQ ID NO: 79448 - DNA, 40 bp, Homo sapiens
gttcttgctgtgttgcccaggctggtctcaaactcctggc

SEQ ID NO: 79449 - DNA, 40 bp, Homo sapiens
gccaggagtttgagaccagcctgggcaacacagcaagaac

SEQ ID NO: 79450 - DNA, 40 bp, Homo sapiens
ttcttgctgtgttgcccaggctggtctcaaactcctggcc

SEQ ID NO: 79451 - DNA, 40 bp, Homo sapiens
ggccaggagtttgagaccagcctgggcaacacagcaagaa

SEQ ID NO: 79452 - DNA, 40 bp, Homo sapiens
tcttgctgtgttgcccaggctggtctcaaactcctggcct

SEQ ID NO: 79453 - DNA, 40 bp, Homo sapiens
aggccaggagtttgagaccagcctgggcaacacagcaaga

SEQ ID NO: 79454 - DNA, 40 bp, Homo sapiens
cttgctgtgttgcccaggctggtctcaaactcctggcctc

SEQ ID NO: 79455 - DNA, 40 bp, Homo sapiens
gaggccaggagtttgagaccagcctgggcaacacagcaag

SEQ ID NO: 79456 - DNA, 40 bp, Homo sapiens
ttgctgtgttgcccaggctggtctcaaactcctggcctca

SEQ ID NO: 79457 - DNA, 40 bp, Homo sapiens
tgaggccaggagtttgagaccagcctgggcaacacagcaa

SEQ ID NO: 79458 - DNA, 40 bp, Homo sapiens
tgctgtgttgcccaggctggtctcaaactcctggcctcaa

SEQ ID NO: 79459 - DNA, 40 bp, Homo sapiens
ttgaggccaggagtttgagaccagcctgggcaacacagca

SEQ ID NO: 79460 - DNA, 40 bp, Homo sapiens
gctgtgttgcccaggctggtctcaaactcctggcctcaag

SEQ ID NO: 79461 - DNA, 40 bp, Homo sapiens
cttgaggccaggagtttgagaccagcctgggcaacacagc

SEQ ID NO: 79462 - DNA, 40 bp, Homo sapiens
ctgtgttgcccaggctggtctcaaactcctggcctcaagc

SEQ ID NO: 79463 - DNA, 40 bp, Homo sapiens
gcttgaggccaggagtttgagaccagcctgggcaacacag

SEQ ID NO: 79464 - DNA, 40 bp, Homo sapiens
tgtgttgcccaggctggtctcaaactcctggcctcaagca

SEQ ID NO: 79465 - DNA, 40 bp, Homo sapiens
tgcttgaggccaggagtttgagaccagcctgggcaacaca

SEQ ID NO: 79466 - DNA, 40 bp, Homo sapiens
gtgttgcccaggctggtctcaaactcctggcctcaagcag

SEQ ID NO: 79467 - DNA, 40 bp, Homo sapiens
ctgcttgaggccaggagtttgagaccagcctgggcaacac

SEQ ID NO: 79468 - DNA, 40 bp, Homo sapiens
tgttgcccaggctggtctcaaactcctggcctcaagcagt

SEQ ID NO: 79469 - DNA, 40 bp, Homo sapiens
actgcttgaggccaggagtttgagaccagcctgggcaaca

SEQ ID NO: 79470 - DNA, 40 bp, Homo sapiens
gttgcccaggctggtctcaaactcctggcctcaagcagtt

SEQ ID NO: 79471 - DNA, 40 bp, Homo sapiens
aactgcttgaggccaggagtttgagaccagcctgggcaac

SEQ ID NO: 79472 - DNA, 40 bp, Homo sapiens
ttgcccaggctggtctcaaactcctggcctcaagcagttc

SEQ ID NO: 79473 - DNA, 40 bp, Homo sapiens
gaactgcttgaggccaggagtttgagaccagcctgggcaa

SEQ ID NO: 79474 - DNA, 40 bp, Homo sapiens
tgcccaggctggtctcaaactcctggcctcaagcagttct

SEQ ID NO: 79475 - DNA, 40 bp, Homo sapiens
agaactgcttgaggccaggagtttgagaccagcctgggca

SEQ ID NO: 79476 - DNA, 40 bp, Homo sapiens
gcccaggctggtctcaaactcctggcctcaagcagttctc

SEQ ID NO: 79477 - DNA, 40 bp, Homo sapiens
gagaactgcttgaggccaggagtttgagaccagcctgggc

SEQ ID NO: 79478 - DNA, 40 bp, Homo sapiens
cccaggctggtctcaaactcctggcctcaagcagttctcc

SEQ ID NO: 79479 - DNA, 40 bp, Homo sapiens
ggagaactgcttgaggccaggagtttgagaccagcctggg

SEQ ID NO: 79480 - DNA, 40 bp, Homo sapiens
ccaggctggtctcaaactcctggcctcaagcagttctcct

SEQ ID NO: 79481 - DNA, 40 bp, Homo sapiens
aggagaactgcttgaggccaggagtttgagaccagcctgg

SEQ ID NO: 79482 - DNA, 40 bp, Homo sapiens
caggctggtctcaaactcctggcctcaagcagttctcctg

SEQ ID NO: 79483 - DNA, 40 bp, Homo sapiens
caggagaactgcttgaggccaggagtttgagaccagcctg

SEQ ID NO: 79484 - DNA, 40 bp, Homo sapiens
aggctggtctcaaactcctggcctcaagcagttctcctgc

SEQ ID NO: 79485 - DNA, 40 bp, Homo sapiens
gcaggagaactgcttgaggccaggagtttgagaccagcct

SEQ ID NO: 79486 - DNA, 40 bp, Homo sapiens
ggctggtctcaaactcctggcctcaagcagttctcctgcc

SEQ ID NO: 79487 - DNA, 40 bp, Homo sapiens
ggcaggagaactgcttgaggccaggagtttgagaccagcc

SEQ ID NO: 79488 - DNA, 40 bp, Homo sapiens
gctggtctcaaactcctggcctcaagcagttctcctgcct

SEQ ID NO: 79489 - DNA, 40 bp, Homo sapiens
aggcaggagaactgcttgaggccaggagtttgagaccagc

SEQ ID NO: 79490 - DNA, 40 bp, Homo sapiens
ctggtctcaaactcctggcctcaagcagttctcctgcctc

SEQ ID NO: 79491 - DNA, 40 bp, Homo sapiens
gaggcaggagaactgcttgaggccaggagtttgagaccag

SEQ ID NO: 79492 - DNA, 40 bp, Homo sapiens
tggtctcaaactcctggcctcaagcagttctcctgcctca

SEQ ID NO: 79493 - DNA, 40 bp, Homo sapiens
tgaggcaggagaactgcttgaggccaggagtttgagacca

SEQ ID NO: 79494 - DNA, 40 bp, Homo sapiens
ggtctcaaactcctggcctcaagcagttctcctgcctcag

SEQ ID NO: 79495 - DNA, 40 bp, Homo sapiens
ctgaggcaggagaactgcttgaggccaggagtttgagacc

SEQ ID NO: 79496 - DNA, 40 bp, Homo sapiens
gtctcaaactcctggcctcaagcagttctcctgcctcagc

SEQ ID NO: 79497 - DNA, 40 bp, Homo sapiens
gctgaggcaggagaactgcttgaggccaggagtttgagac

SEQ ID NO: 79498 - DNA, 40 bp, Homo sapiens
tctcaaactcctggcctcaagcagttctcctgcctcagcc

SEQ ID NO: 79499 - DNA, 40 bp, Homo sapiens
ggctgaggcaggagaactgcttgaggccaggagtttgaga

SEQ ID NO: 79500 - DNA, 40 bp, Homo sapiens
ctcaaactcctggcctcaagcagttctcctgcctcagcct

SEQ ID NO: 79501 - DNA, 40 bp, Homo sapiens
aggctgaggcaggagaactgcttgaggccaggagtttgag

SEQ ID NO: 79502 - DNA, 40 bp, Homo sapiens
tcaaactcctggcctcaagcagttctcctgcctcagcctc

SEQ ID NO: 79503 - DNA, 40 bp, Homo sapiens
gaggctgaggcaggagaactgcttgaggccaggagtttga

SEQ ID NO: 79504 - DNA, 40 bp, Homo sapiens
caaactcctggcctcaagcagttctcctgcctcagcctcc

SEQ ID NO: 79505 - DNA, 40 bp, Homo sapiens
ggaggctgaggcaggagaactgcttgaggccaggagtttg

SEQ ID NO: 79506 - DNA, 40 bp, Homo sapiens
aaactcctggcctcaagcagttctcctgcctcagcctccc

SEQ ID NO: 79507 - DNA, 40 bp, Homo sapiens
gggaggctgaggcaggagaactgcttgaggccaggagttt

SEQ ID NO: 79508 - DNA, 40 bp, Homo sapiens
aactcctggcctcaagcagttctcctgcctcagcctccca

SEQ ID NO: 79509 - DNA, 40 bp, Homo sapiens
tgggaggctgaggcaggagaactgcttgaggccaggagtt

SEQ ID NO: 79510 - DNA, 40 bp, Homo sapiens
actcctggcctcaagcagttctcctgcctcagcctcccaa

SEQ ID NO: 79511 - DNA, 40 bp, Homo sapiens
ttgggaggctgaggcaggagaactgcttgaggccaggagt

SEQ ID NO: 79512 - DNA, 40 bp, Homo sapiens
ctcctggcctcaagcagttctcctgcctcagcctcccaaa

SEQ ID NO: 79513 - DNA, 40 bp, Homo sapiens
tttgggaggctgaggcaggagaactgcttgaggccaggag

SEQ ID NO: 79514 - DNA, 40 bp, Homo sapiens
tcctggcctcaagcagttctcctgcctcagcctcccaaat

SEQ ID NO: 79515 - DNA, 40 bp, Homo sapiens
atttgggaggctgaggcaggagaactgcttgaggccagga

SEQ ID NO: 79516 - DNA, 40 bp, Homo sapiens
cctggcctcaagcagttctcctgcctcagcctcccaaatt

SEQ ID NO: 79517 - DNA, 40 bp, Homo sapiens
aatttgggaggctgaggcaggagaactgcttgaggccagg

SEQ ID NO: 79518 - DNA, 40 bp, Homo sapiens
ctggcctcaagcagttctcctgcctcagcctcccaaattg

SEQ ID NO: 79519 - DNA, 40 bp, Homo sapiens
caatttgggaggctgaggcaggagaactgcttgaggccag

SEQ ID NO: 79520 - DNA, 40 bp, Homo sapiens
tggcctcaagcagttctcctgcctcagcctcccaaattgc

SEQ ID NO: 79521 - DNA, 40 bp, Homo sapiens
gcaatttgggaggctgaggcaggagaactgcttgaggcca

SEQ ID NO: 79522 - DNA, 40 bp, Homo sapiens
ggcctcaagcagttctcctgcctcagcctcccaaattgct

SEQ ID NO: 79523 - DNA, 40 bp, Homo sapiens
agcaatttgggaggctgaggcaggagaactgcttgaggcc

SEQ ID NO: 79524 - DNA, 40 bp, Homo sapiens
gcctcaagcagttctcctgcctcagcctcccaaattgctg

SEQ ID NO: 79525 - DNA, 40 bp, Homo sapiens
cagcaatttgggaggctgaggcaggagaactgcttgaggc

SEQ ID NO: 79526 - DNA, 40 bp, Homo sapiens
cctcaagcagttctcctgcctcagcctcccaaattgctgt

SEQ ID NO: 79527 - DNA, 40 bp, Homo sapiens
acagcaatttgggaggctgaggcaggagaactgcttgagg

SEQ ID NO: 79528 - DNA, 40 bp, Homo sapiens
ctcaagcagttctcctgcctcagcctcccaaattgctgtg

SEQ ID NO: 79529 - DNA, 40 bp, Homo sapiens
cacagcaatttgggaggctgaggcaggagaactgcttgag

SEQ ID NO: 79530 - DNA, 40 bp, Homo sapiens
tcaagcagttctcctgcctcagcctcccaaattgctgtga

SEQ ID NO: 79531 - DNA, 40 bp, Homo sapiens
tcacagcaatttgggaggctgaggcaggagaactgcttga

SEQ ID NO: 79532 - DNA, 40 bp, Homo sapiens
caagcagttctcctgcctcagcctcccaaattgctgtgac

SEQ ID NO: 79533 - DNA, 40 bp, Homo sapiens
gtcacagcaatttgggaggctgaggcaggagaactgcttg

SEQ ID NO: 79534 - DNA, 40 bp, Homo sapiens
aagcagttctcctgcctcagcctcccaaattgctgtgact

SEQ ID NO: 79535 - DNA, 40 bp, Homo sapiens
agtcacagcaatttgggaggctgaggcaggagaactgctt

SEQ ID NO: 79536 - DNA, 40 bp, Homo sapiens
agcagttctcctgcctcagcctcccaaattgctgtgactg

SEQ ID NO: 79537 - DNA, 40 bp, Homo sapiens
cagtcacagcaatttgggaggctgaggcaggagaactgct

SEQ ID NO: 79538 - DNA, 40 bp, Homo sapiens
gcagttctcctgcctcagcctcccaaattgctgtgactgt

SEQ ID NO: 79539 - DNA, 40 bp, Homo sapiens
acagtcacagcaatttgggaggctgaggcaggagaactgc

SEQ ID NO: 79540 - DNA, 40 bp, Homo sapiens
cagttctcctgcctcagcctcccaaattgctgtgactgta

SEQ ID NO: 79541 - DNA, 40 bp, Homo sapiens
tacagtcacagcaatttgggaggctgaggcaggagaactg

SEQ ID NO: 79542 - DNA, 40 bp, Homo sapiens
agttctcctgcctcagcctcccaaattgctgtgactgtag

SEQ ID NO: 79543 - DNA, 40 bp, Homo sapiens
ctacagtcacagcaatttgggaggctgaggcaggagaact

SEQ ID NO: 79544 - DNA, 40 bp, Homo sapiens
gttctcctgcctcagcctcccaaattgctgtgactgtagg

SEQ ID NO: 79545 - DNA, 40 bp, Homo sapiens
cctacagtcacagcaatttgggaggctgaggcaggagaac

SEQ ID NO: 79546 - DNA, 40 bp, Homo sapiens
ttctcctgcctcagcctcccaaattgctgtgactgtaggt

SEQ ID NO: 79547 - DNA, 40 bp, Homo sapiens
acctacagtcacagcaatttgggaggctgaggcaggagaa

SEQ ID NO: 79548 - DNA, 40 bp, Homo sapiens
tctcctgcctcagcctcccaaattgctgtgactgtaggtg

SEQ ID NO: 79549 - DNA, 40 bp, Homo sapiens
cacctacagtcacagcaatttgggaggctgaggcaggaga

SEQ ID NO: 79550 - DNA, 40 bp, Homo sapiens
ctcctgcctcagcctcccaaattgctgtgactgtaggtgt

SEQ ID NO: 79551 - DNA, 40 bp, Homo sapiens
acacctacagtcacagcaatttgggaggctgaggcaggag

SEQ ID NO: 79552 - DNA, 40 bp, Homo sapiens
tcctgcctcagcctcccaaattgctgtgactgtaggtgtg

SEQ ID NO: 79553 - DNA, 40 bp, Homo sapiens
cacacctacagtcacagcaatttgggaggctgaggcagga

SEQ ID NO: 79554 - DNA, 40 bp, Homo sapiens
cctgcctcagcctcccaaattgctgtgactgtaggtgtga

SEQ ID NO: 79555 - DNA, 40 bp, Homo sapiens
tcacacctacagtcacagcaatttgggaggctgaggcagg

SEQ ID NO: 79556 - DNA, 40 bp, Homo sapiens
ctgcctcagcctcccaaattgctgtgactgtaggtgtgag

SEQ ID NO: 79557 - DNA, 40 bp, Homo sapiens
ctcacacctacagtcacagcaatttgggaggctgaggcag

SEQ ID NO: 79558 - DNA, 40 bp, Homo sapiens
tgcctcagcctcccaaattgctgtgactgtaggtgtgagc

SEQ ID NO: 79559 - DNA, 40 bp, Homo sapiens
gctcacacctacagtcacagcaatttgggaggctgaggca

SEQ ID NO: 79560 - DNA, 40 bp, Homo sapiens
gcctcagcctcccaaattgctgtgactgtaggtgtgagcc

SEQ ID NO: 79561 - DNA, 40 bp, Homo sapiens
ggctcacacctacagtcacagcaatttgggaggctgaggc

SEQ ID NO: 79562 - DNA, 40 bp, Homo sapiens
cctcagcctcccaaattgctgtgactgtaggtgtgagcca

SEQ ID NO: 79563 - DNA, 40 bp, Homo sapiens
tggctcacacctacagtcacagcaatttgggaggctgagg

SEQ ID NO: 79564 - DNA, 40 bp, Homo sapiens
ctcagcctcccaaattgctgtgactgtaggtgtgagccac

SEQ ID NO: 79565 - DNA, 40 bp, Homo sapiens
gtggctcacacctacagtcacagcaatttgggaggctgag

SEQ ID NO: 79566 - DNA, 40 bp, Homo sapiens
tcagcctcccaaattgctgtgactgtaggtgtgagccact

SEQ ID NO: 79567 - DNA, 40 bp, Homo sapiens
agtggctcacacctacagtcacagcaatttgggaggctga

SEQ ID NO: 79568 - DNA, 40 bp, Homo sapiens
cagcctcccaaattgctgtgactgtaggtgtgagccactg

SEQ ID NO: 79569 - DNA, 40 bp, Homo sapiens
cagtggctcacacctacagtcacagcaatttgggaggctg

SEQ ID NO: 79570 - DNA, 40 bp, Homo sapiens
agcctcccaaattgctgtgactgtaggtgtgagccactgc

SEQ ID NO: 79571 - DNA, 40 bp, Homo sapiens
gcagtggctcacacctacagtcacagcaatttgggaggct

SEQ ID NO: 79572 - DNA, 40 bp, Homo sapiens
gcctcccaaattgctgtgactgtaggtgtgagccactgca

SEQ ID NO: 79573 - DNA, 40 bp, Homo sapiens
tgcagtggctcacacctacagtcacagcaatttgggaggc

SEQ ID NO: 79574 - DNA, 40 bp, Homo sapiens
cctcccaaattgctgtgactgtaggtgtgagccactgcac

SEQ ID NO: 79575 - DNA, 40 bp, Homo sapiens
gtgcagtggctcacacctacagtcacagcaatttgggagg

SEQ ID NO: 79576 - DNA, 40 bp, Homo sapiens
ctcccaaattgctgtgactgtaggtgtgagccactgcact

SEQ ID NO: 79577 - DNA, 40 bp, Homo sapiens
agtgcagtggctcacacctacagtcacagcaatttgggag

SEQ ID NO: 79578 - DNA, 40 bp, Homo sapiens
tcccaaattgctgtgactgtaggtgtgagccactgcactg

SEQ ID NO: 79579 - DNA, 40 bp, Homo sapiens
cagtgcagtggctcacacctacagtcacagcaatttggga

SEQ ID NO: 79580 - DNA, 40 bp, Homo sapiens
cccaaattgctgtgactgtaggtgtgagccactgcactgg

SEQ ID NO: 79581 - DNA, 40 bp, Homo sapiens
ccagtgcagtggctcacacctacagtcacagcaatttggg

SEQ ID NO: 79582 - DNA, 40 bp, Homo sapiens
ccaaattgctgtgactgtaggtgtgagccactgcactggg

SEQ ID NO: 79583 - DNA, 40 bp, Homo sapiens
cccagtgcagtggctcacacctacagtcacagcaatttgg

SEQ ID NO: 79584 - DNA, 40 bp, Homo sapiens
caaattgctgtgactgtaggtgtgagccactgcactgggc

SEQ ID NO: 79585 - DNA, 40 bp, Homo sapiens
gcccagtgcagtggctcacacctacagtcacagcaatttg

SEQ ID NO: 79586 - DNA, 40 bp, Homo sapiens
aaattgctgtgactgtaggtgtgagccactgcactgggcc

SEQ ID NO: 79587 - DNA, 40 bp, Homo sapiens
ggcccagtgcagtggctcacacctacagtcacagcaattt

SEQ ID NO: 79588 - DNA, 40 bp, Homo sapiens
aattgctgtgactgtaggtgtgagccactgcactgggcca

SEQ ID NO: 79589 - DNA, 40 bp, Homo sapiens
tggcccagtgcagtggctcacacctacagtcacagcaatt

SEQ ID NO: 79590 - DNA, 40 bp, Homo sapiens
attgctgtgactgtaggtgtgagccactgcactgggccaa

SEQ ID NO: 79591 - DNA, 40 bp, Homo sapiens
ttggcccagtgcagtggctcacacctacagtcacagcaat

SEQ ID NO: 79592 - DNA, 40 bp, Homo sapiens
ttgctgtgactgtaggtgtgagccactgcactgggccaaa

SEQ ID NO: 79593 - DNA, 40 bp, Homo sapiens
tttggcccagtgcagtggctcacacctacagtcacagcaa

SEQ ID NO: 79594 - DNA, 40 bp, Homo sapiens
tgctgtgactgtaggtgtgagccactgcactgggccaaaa

SEQ ID NO: 79595 - DNA, 40 bp, Homo sapiens
ttttggcccagtgcagtggctcacacctacagtcacagca

SEQ ID NO: 79596 - DNA, 40 bp, Homo sapiens
gctgtgactgtaggtgtgagccactgcactgggccaaaat

SEQ ID NO: 79597 - DNA, 40 bp, Homo sapiens
attttggcccagtgcagtggctcacacctacagtcacagc

SEQ ID NO: 79598 - DNA, 40 bp, Homo sapiens
ctgtgactgtaggtgtgagccactgcactgggccaaaatt

SEQ ID NO: 79599 - DNA, 40 bp, Homo sapiens
aattttggcccagtgcagtggctcacacctacagtcacag

SEQ ID NO: 79600 - DNA, 40 bp, Homo sapiens
tgtgactgtaggtgtgagccactgcactgggccaaaatta

SEQ ID NO: 79601 - DNA, 40 bp, Homo sapiens
taattttggcccagtgcagtggctcacacctacagtcaca

SEQ ID NO: 79602 - DNA, 40 bp, Homo sapiens
gtgactgtaggtgtgagccactgcactgggccaaaattac

SEQ ID NO: 79603 - DNA, 40 bp, Homo sapiens
gtaattttggcccagtgcagtggctcacacctacagtcac

SEQ ID NO: 79604 - DNA, 40 bp, Homo sapiens
tgactgtaggtgtgagccactgcactgggccaaaattact

SEQ ID NO: 79605 - DNA, 40 bp, Homo sapiens
agtaattttggcccagtgcagtggctcacacctacagtca

SEQ ID NO: 79606 - DNA, 40 bp, Homo sapiens
gactgtaggtgtgagccactgcactgggccaaaattactt

SEQ ID NO: 79607 - DNA, 40 bp, Homo sapiens
aagtaattttggcccagtgcagtggctcacacctacagtc

SEQ ID NO: 79608 - DNA, 40 bp, Homo sapiens
actgtaggtgtgagccactgcactgggccaaaattactta

SEQ ID NO: 79609 - DNA, 40 bp, Homo sapiens
taagtaattttggcccagtgcagtggctcacacctacagt

SEQ ID NO: 79610 - DNA, 40 bp, Homo sapiens
ctgtaggtgtgagccactgcactgggccaaaattacttaa

SEQ ID NO: 79611 - DNA, 40 bp, Homo sapiens
ttaagtaattttggcccagtgcagtggctcacacctacag

SEQ ID NO: 79612 - DNA, 40 bp, Homo sapiens
tgtaggtgtgagccactgcactgggccaaaattacttaat

SEQ ID NO: 79613 - DNA, 40 bp, Homo sapiens
attaagtaattttggcccagtgcagtggctcacacctaca

SEQ ID NO: 79614 - DNA, 40 bp, Homo sapiens
gtaggtgtgagccactgcactgggccaaaattacttaatt

SEQ ID NO: 79615 - DNA, 40 bp, Homo sapiens
aattaagtaattttggcccagtgcagtggctcacacctac

SEQ ID NO: 79616 - DNA, 40 bp, Homo sapiens
taggtgtgagccactgcactgggccaaaattacttaattt

SEQ ID NO: 79617 - DNA, 40 bp, Homo sapiens
aaattaagtaattttggcccagtgcagtggctcacaccta

SEQ ID NO: 79618 - DNA, 40 bp, Homo sapiens
aggtgtgagccactgcactgggccaaaattacttaatttt

SEQ ID NO: 79619 - DNA, 40 bp, Homo sapiens
aaaattaagtaattttggcccagtgcagtggctcacacct

SEQ ID NO: 79620 - DNA, 40 bp, Homo sapiens
ggtgtgagccactgcactgggccaaaattacttaatttta

SEQ ID NO: 79621 - DNA, 40 bp, Homo sapiens
taaaattaagtaattttggcccagtgcagtggctcacacc

SEQ ID NO: 79622 - DNA, 40 bp, Homo sapiens
gtgtgagccactgcactgggccaaaattacttaattttaa

SEQ ID NO: 79623 - DNA, 40 bp, Homo sapiens
ttaaaattaagtaattttggcccagtgcagtggctcacac

SEQ ID NO: 79624 - DNA, 40 bp, Homo sapiens
tgtgagccactgcactgggccaaaattacttaattttaac

SEQ ID NO: 79625 - DNA, 40 bp, Homo sapiens
gttaaaattaagtaattttggcccagtgcagtggctcaca

SEQ ID NO: 79626 - DNA, 40 bp, Homo sapiens
gtgagccactgcactgggccaaaattacttaattttaaca

SEQ ID NO: 79627 - DNA, 40 bp, Homo sapiens
tgttaaaattaagtaattttggcccagtgcagtggctcac

SEQ ID NO: 79628 - DNA, 40 bp, Homo sapiens
tgagccactgcactgggccaaaattacttaattttaacaa

SEQ ID NO: 79629 - DNA, 40 bp, Homo sapiens
ttgttaaaattaagtaattttggcccagtgcagtggctca

SEQ ID NO: 79630 - DNA, 40 bp, Homo sapiens
gagccactgcactgggccaaaattacttaattttaacaag

SEQ ID NO: 79631 - DNA, 40 bp, Homo sapiens
cttgttaaaattaagtaattttggcccagtgcagtggctc

SEQ ID NO: 79632 - DNA, 40 bp, Homo sapiens
agccactgcactgggccaaaattacttaattttaacaaga

SEQ ID NO: 79633 - DNA, 40 bp, Homo sapiens
tcttgttaaaattaagtaattttggcccagtgcagtggct

SEQ ID NO: 79634 - DNA, 40 bp, Homo sapiens
gccactgcactgggccaaaattacttaattttaacaagat

SEQ ID NO: 79635 - DNA, 40 bp, Homo sapiens
atcttgttaaaattaagtaattttggcccagtgcagtggc

SEQ ID NO: 79636 - DNA, 40 bp, Homo sapiens
ccactgcactgggccaaaattacttaattttaacaagatg

SEQ ID NO: 79637 - DNA, 40 bp, Homo sapiens
catcttgttaaaattaagtaattttggcccagtgcagtgg

SEQ ID NO: 79638 - DNA, 40 bp, Homo sapiens
cactgcactgggccaaaattacttaattttaacaagatga

SEQ ID NO: 79639 - DNA, 40 bp, Homo sapiens
tcatcttgttaaaattaagtaattttggcccagtgcagtg

SEQ ID NO: 79640 - DNA, 40 bp, Homo sapiens
actgcactgggccaaaattacttaattttaacaagatgat

SEQ ID NO: 79641 - DNA, 40 bp, Homo sapiens
atcatcttgttaaaattaagtaattttggcccagtgcagt

SEQ ID NO: 79642 - DNA, 40 bp, Homo sapiens
ctgcactgggccaaaattacttaattttaacaagatgatg

SEQ ID NO: 79643 - DNA, 40 bp, Homo sapiens
catcatcttgttaaaattaagtaattttggcccagtgcag

SEQ ID NO: 79644 - DNA, 40 bp, Homo sapiens
tgcactgggccaaaattacttaattttaacaagatgatgt

SEQ ID NO: 79645 - DNA, 40 bp, Homo sapiens
acatcatcttgttaaaattaagtaattttggcccagtgca

SEQ ID NO: 79646 - DNA, 40 bp, Homo sapiens
gcactgggccaaaattacttaattttaacaagatgatgta

SEQ ID NO: 79647 - DNA, 40 bp, Homo sapiens
tacatcatcttgttaaaattaagtaattttggcccagtgc

SEQ ID NO: 79648 - DNA, 40 bp, Homo sapiens
cactgggccaaaattacttaattttaacaagatgatgtag

SEQ ID NO: 79649 - DNA, 40 bp, Homo sapiens
ctacatcatcttgttaaaattaagtaattttggcccagtg

SEQ ID NO: 79650 - DNA, 40 bp, Homo sapiens
actgggccaaaattacttaattttaacaagatgatgtaga

SEQ ID NO: 79651 - DNA, 40 bp, Homo sapiens
tctacatcatcttgttaaaattaagtaattttggcccagt

SEQ ID NO: 79652 - DNA, 40 bp, Homo sapiens
ctgggccaaaattacttaattttaacaagatgatgtagag

SEQ ID NO: 79653 - DNA, 40 bp, Homo sapiens
ctctacatcatcttgttaaaattaagtaattttggcccag

SEQ ID NO: 79654 - DNA, 40 bp, Homo sapiens
tgggccaaaattacttaattttaacaagatgatgtagaga

SEQ ID NO: 79655 - DNA, 40 bp, Homo sapiens
tctctacatcatcttgttaaaattaagtaattttggccca

SEQ ID NO: 79656 - DNA, 40 bp, Homo sapiens
gggccaaaattacttaattttaacaagatgatgtagagag

SEQ ID NO: 79657 - DNA, 40 bp, Homo sapiens
ctctctacatcatcttgttaaaattaagtaattttggccc

SEQ ID NO: 79658 - DNA, 40 bp, Homo sapiens
ggccaaaattacttaattttaacaagatgatgtagagagg

SEQ ID NO: 79659 - DNA, 40 bp, Homo sapiens
cctctctacatcatcttgttaaaattaagtaattttggcc

SEQ ID NO: 79660 - DNA, 40 bp, Homo sapiens
gccaaaattacttaattttaacaagatgatgtagagagga

SEQ ID NO: 79661 - DNA, 40 bp, Homo sapiens
tcctctctacatcatcttgttaaaattaagtaattttggc

SEQ ID NO: 79662 - DNA, 40 bp, Homo sapiens
ccaaaattacttaattttaacaagatgatgtagagaggag

SEQ ID NO: 79663 - DNA, 40 bp, Homo sapiens
ctcctctctacatcatcttgttaaaattaagtaattttgg

SEQ ID NO: 79664 - DNA, 40 bp, Homo sapiens
caaaattacttaattttaacaagatgatgtagagaggaga

SEQ ID NO: 79665 - DNA, 40 bp, Homo sapiens
tctcctctctacatcatcttgttaaaattaagtaattttg

SEQ ID NO: 79666 - DNA, 40 bp, Homo sapiens
aaaattacttaattttaacaagatgatgtagagaggagag

SEQ ID NO: 79667 - DNA, 40 bp, Homo sapiens
ctctcctctctacatcatcttgttaaaattaagtaatttt

SEQ ID NO: 79668 - DNA, 40 bp, Homo sapiens
aaattacttaattttaacaagatgatgtagagaggagagt

SEQ ID NO: 79669 - DNA, 40 bp, Homo sapiens
actctcctctctacatcatcttgttaaaattaagtaattt

SEQ ID NO: 79670 - DNA, 40 bp, Homo sapiens
aattacttaattttaacaagatgatgtagagaggagagtt

SEQ ID NO: 79671 - DNA, 40 bp, Homo sapiens
aactctcctctctacatcatcttgttaaaattaagtaatt

SEQ ID NO: 79672 - DNA, 40 bp, Homo sapiens
attacttaattttaacaagatgatgtagagaggagagttc

SEQ ID NO: 79673 - DNA, 40 bp, Homo sapiens
gaactctcctctctacatcatcttgttaaaattaagtaat

SEQ ID NO: 79674 - DNA, 40 bp, Homo sapiens
ttacttaattttaacaagatgatgtagagaggagagttca

SEQ ID NO: 79675 - DNA, 40 bp, Homo sapiens
tgaactctcctctctacatcatcttgttaaaattaagtaa

SEQ ID NO: 79676 - DNA, 40 bp, Homo sapiens
tacttaattttaacaagatgatgtagagaggagagttcat

SEQ ID NO: 79677 - DNA, 40 bp, Homo sapiens
atgaactctcctctctacatcatcttgttaaaattaagta

SEQ ID NO: 79678 - DNA, 40 bp, Homo sapiens
acttaattttaacaagatgatgtagagaggagagttcatt

SEQ ID NO: 79679 - DNA, 40 bp, Homo sapiens
aatgaactctcctctctacatcatcttgttaaaattaagt

SEQ ID NO: 79680 - DNA, 40 bp, Homo sapiens
cttaattttaacaagatgatgtagagaggagagttcattg

SEQ ID NO: 79681 - DNA, 40 bp, Homo sapiens
caatgaactctcctctctacatcatcttgttaaaattaag

SEQ ID NO: 79682 - DNA, 40 bp, Homo sapiens
ttaattttaacaagatgatgtagagaggagagttcattgc

SEQ ID NO: 79683 - DNA, 40 bp, Homo sapiens
gcaatgaactctcctctctacatcatcttgttaaaattaa

SEQ ID NO: 79684 - DNA, 40 bp, Homo sapiens
taattttaacaagatgatgtagagaggagagttcattgca

SEQ ID NO: 79685 - DNA, 40 bp, Homo sapiens
tgcaatgaactctcctctctacatcatcttgttaaaatta

SEQ ID NO: 79686 - DNA, 40 bp, Homo sapiens
aattttaacaagatgatgtagagaggagagttcattgcaa

SEQ ID NO: 79687 - DNA, 40 bp, Homo sapiens
ttgcaatgaactctcctctctacatcatcttgttaaaatt

SEQ ID NO: 79688 - DNA, 40 bp, Homo sapiens
attttaacaagatgatgtagagaggagagttcattgcaac

SEQ ID NO: 79689 - DNA, 40 bp, Homo sapiens
gttgcaatgaactctcctctctacatcatcttgttaaaat

SEQ ID NO: 79690 - DNA, 40 bp, Homo sapiens
ttttaacaagatgatgtagagaggagagttcattgcaaca

SEQ ID NO: 79691 - DNA, 40 bp, Homo sapiens
tgttgcaatgaactctcctctctacatcatcttgttaaaa

SEQ ID NO: 79692 - DNA, 40 bp, Homo sapiens
tttaacaagatgatgtagagaggagagttcattgcaacat

SEQ ID NO: 79693 - DNA, 40 bp, Homo sapiens
atgttgcaatgaactctcctctctacatcatcttgttaaa

SEQ ID NO: 79694 - DNA, 40 bp, Homo sapiens
ttaacaagatgatgtagagaggagagttcattgcaacata

SEQ ID NO: 79695 - DNA, 40 bp, Homo sapiens
tatgttgcaatgaactctcctctctacatcatcttgttaa

SEQ ID NO: 79696 - DNA, 40 bp, Homo sapiens
taacaagatgatgtagagaggagagttcattgcaacataa

SEQ ID NO: 79697 - DNA, 40 bp, Homo sapiens
ttatgttgcaatgaactctcctctctacatcatcttgtta

SEQ ID NO: 79698 - DNA, 40 bp, Homo sapiens
aacaagatgatgtagagaggagagttcattgcaacataag

SEQ ID NO: 79699 - DNA, 40 bp, Homo sapiens
cttatgttgcaatgaactctcctctctacatcatcttgtt

SEQ ID NO: 79700 - DNA, 40 bp, Homo sapiens
acaagatgatgtagagaggagagttcattgcaacataagc

SEQ ID NO: 79701 - DNA, 40 bp, Homo sapiens
gcttatgttgcaatgaactctcctctctacatcatcttgt

SEQ ID NO: 79702 - DNA, 40 bp, Homo sapiens
caagatgatgtagagaggagagttcattgcaacataagcc

SEQ ID NO: 79703 - DNA, 40 bp, Homo sapiens
ggcttatgttgcaatgaactctcctctctacatcatcttg

SEQ ID NO: 79704 - DNA, 40 bp, Homo sapiens
aagatgatgtagagaggagagttcattgcaacataagcct

SEQ ID NO: 79705 - DNA, 40 bp, Homo sapiens
aggcttatgttgcaatgaactctcctctctacatcatctt

SEQ ID NO: 79706 - DNA, 40 bp, Homo sapiens
agatgatgtagagaggagagttcattgcaacataagccta

SEQ ID NO: 79707 - DNA, 40 bp, Homo sapiens
taggcttatgttgcaatgaactctcctctctacatcatct

SEQ ID NO: 79708 - DNA, 40 bp, Homo sapiens
gatgatgtagagaggagagttcattgcaacataagcctag

SEQ ID NO: 79709 - DNA, 40 bp, Homo sapiens
ctaggcttatgttgcaatgaactctcctctctacatcatc

SEQ ID NO: 79710 - DNA, 40 bp, Homo sapiens
atgatgtagagaggagagttcattgcaacataagcctaga

SEQ ID NO: 79711 - DNA, 40 bp, Homo sapiens
tctaggcttatgttgcaatgaactctcctctctacatcat

SEQ ID NO: 79712 - DNA, 40 bp, Homo sapiens
tgatgtagagaggagagttcattgcaacataagcctagaa

SEQ ID NO: 79713 - DNA, 40 bp, Homo sapiens
ttctaggcttatgttgcaatgaactctcctctctacatca

SEQ ID NO: 79714 - DNA, 40 bp, Homo sapiens
gatgtagagaggagagttcattgcaacataagcctagaat

SEQ ID NO: 79715 - DNA, 40 bp, Homo sapiens
attctaggcttatgttgcaatgaactctcctctctacatc

SEQ ID NO: 79716 - DNA, 40 bp, Homo sapiens
atgtagagaggagagttcattgcaacataagcctagaatc

SEQ ID NO: 79717 - DNA, 40 bp, Homo sapiens
gattctaggcttatgttgcaatgaactctcctctctacat

SEQ ID NO: 79718 - DNA, 40 bp, Homo sapiens
tgtagagaggagagttcattgcaacataagcctagaatct

SEQ ID NO: 79719 - DNA, 40 bp, Homo sapiens
agattctaggcttatgttgcaatgaactctcctctctaca

SEQ ID NO: 79720 - DNA, 40 bp, Homo sapiens
gtagagaggagagttcattgcaacataagcctagaatctt

SEQ ID NO: 79721 - DNA, 40 bp, Homo sapiens
aagattctaggcttatgttgcaatgaactctcctctctac

SEQ ID NO: 79722 - DNA, 40 bp, Homo sapiens
tagagaggagagttcattgcaacataagcctagaatcttt

SEQ ID NO: 79723 - DNA, 40 bp, Homo sapiens
aaagattctaggcttatgttgcaatgaactctcctctcta

SEQ ID NO: 79724 - DNA, 40 bp, Homo sapiens
agagaggagagttcattgcaacataagcctagaatctttg

SEQ ID NO: 79725 - DNA, 40 bp, Homo sapiens
caaagattctaggcttatgttgcaatgaactctcctctct

SEQ ID NO: 79726 - DNA, 40 bp, Homo sapiens
gagaggagagttcattgcaacataagcctagaatctttgt

SEQ ID NO: 79727 - DNA, 40 bp, Homo sapiens
acaaagattctaggcttatgttgcaatgaactctcctctc

SEQ ID NO: 79728 - DNA, 40 bp, Homo sapiens
agaggagagttcattgcaacataagcctagaatctttgtc

SEQ ID NO: 79729 - DNA, 40 bp, Homo sapiens
gacaaagattctaggcttatgttgcaatgaactctcctct

SEQ ID NO: 79730 - DNA, 40 bp, Homo sapiens
gaggagagttcattgcaacataagcctagaatctttgtca

SEQ ID NO: 79731 - DNA, 40 bp, Homo sapiens
tgacaaagattctaggcttatgttgcaatgaactctcctc

SEQ ID NO: 79732 - DNA, 40 bp, Homo sapiens
aggagagttcattgcaacataagcctagaatctttgtcag

SEQ ID NO: 79733 - DNA, 40 bp, Homo sapiens
ctgacaaagattctaggcttatgttgcaatgaactctcct

SEQ ID NO: 79734 - DNA, 40 bp, Homo sapiens
ggagagttcattgcaacataagcctagaatctttgtcaga

SEQ ID NO: 79735 - DNA, 40 bp, Homo sapiens
tctgacaaagattctaggcttatgttgcaatgaactctcc

SEQ ID NO: 79736 - DNA, 40 bp, Homo sapiens
gagagttcattgcaacataagcctagaatctttgtcagaa

SEQ ID NO: 79737 - DNA, 40 bp, Homo sapiens
ttctgacaaagattctaggcttatgttgcaatgaactctc

SEQ ID NO: 79738 - DNA, 40 bp, Homo sapiens
agagttcattgcaacataagcctagaatctttgtcagaat

SEQ ID NO: 79739 - DNA, 40 bp, Homo sapiens
attctgacaaagattctaggcttatgttgcaatgaactct

SEQ ID NO: 79740 - DNA, 40 bp, Homo sapiens
gagttcattgcaacataagcctagaatctttgtcagaatc

SEQ ID NO: 79741 - DNA, 40 bp, Homo sapiens
gattctgacaaagattctaggcttatgttgcaatgaactc

SEQ ID NO: 79742 - DNA, 40 bp, Homo sapiens
agttcattgcaacataagcctagaatctttgtcagaatct

SEQ ID NO: 79743 - DNA, 40 bp, Homo sapiens
agattctgacaaagattctaggcttatgttgcaatgaact

SEQ ID NO: 79744 - DNA, 40 bp, Homo sapiens
gttcattgcaacataagcctagaatctttgtcagaatctt

SEQ ID NO: 79745 - DNA, 40 bp, Homo sapiens
aagattctgacaaagattctaggcttatgttgcaatgaac

SEQ ID NO: 79746 - DNA, 40 bp, Homo sapiens
ttcattgcaacataagcctagaatctttgtcagaatctta

SEQ ID NO: 79747 - DNA, 40 bp, Homo sapiens
taagattctgacaaagattctaggcttatgttgcaatgaa

SEQ ID NO: 79748 - DNA, 40 bp, Homo sapiens
tcattgcaacataagcctagaatctttgtcagaatcttag

SEQ ID NO: 79749 - DNA, 40 bp, Homo sapiens
ctaagattctgacaaagattctaggcttatgttgcaatga

SEQ ID NO: 79750 - DNA, 40 bp, Homo sapiens
cattgcaacataagcctagaatctttgtcagaatcttagg

SEQ ID NO: 79751 - DNA, 40 bp, Homo sapiens
cctaagattctgacaaagattctaggcttatgttgcaatg

SEQ ID NO: 79752 - DNA, 40 bp, Homo sapiens
attgcaacataagcctagaatctttgtcagaatcttagga

SEQ ID NO: 79753 - DNA, 40 bp, Homo sapiens
tcctaagattctgacaaagattctaggcttatgttgcaat

SEQ ID NO: 79754 - DNA, 40 bp, Homo sapiens
ttgcaacataagcctagaatctttgtcagaatcttaggaa

SEQ ID NO: 79755 - DNA, 40 bp, Homo sapiens
ttcctaagattctgacaaagattctaggcttatgttgcaa

SEQ ID NO: 79756 - DNA, 40 bp, Homo sapiens
tgcaacataagcctagaatctttgtcagaatcttaggaag

SEQ ID NO: 79757 - DNA, 40 bp, Homo sapiens
cttcctaagattctgacaaagattctaggcttatgttgca

SEQ ID NO: 79758 - DNA, 40 bp, Homo sapiens
gcaacataagcctagaatctttgtcagaatcttaggaagt

SEQ ID NO: 79759 - DNA, 40 bp, Homo sapiens
acttcctaagattctgacaaagattctaggcttatgttgc

SEQ ID NO: 79760 - DNA, 40 bp, Homo sapiens
caacataagcctagaatctttgtcagaatcttaggaagta

SEQ ID NO: 79761 - DNA, 40 bp, Homo sapiens
tacttcctaagattctgacaaagattctaggcttatgttg

SEQ ID NO: 79762 - DNA, 40 bp, Homo sapiens
aacataagcctagaatctttgtcagaatcttaggaagtaa

SEQ ID NO: 79763 - DNA, 40 bp, Homo sapiens
ttacttcctaagattctgacaaagattctaggcttatgtt

SEQ ID NO: 79764 - DNA, 40 bp, Homo sapiens
acataagcctagaatctttgtcagaatcttaggaagtaat

SEQ ID NO: 79765 - DNA, 40 bp, Homo sapiens
attacttcctaagattctgacaaagattctaggcttatgt

SEQ ID NO: 79766 - DNA, 40 bp, Homo sapiens
cataagcctagaatctttgtcagaatcttaggaagtaatg

SEQ ID NO: 79767 - DNA, 40 bp, Homo sapiens
cattacttcctaagattctgacaaagattctaggcttatg

SEQ ID NO: 79768 - DNA, 40 bp, Homo sapiens
ataagcctagaatctttgtcagaatcttaggaagtaatgt

SEQ ID NO: 79769 - DNA, 40 bp, Homo sapiens
acattacttcctaagattctgacaaagattctaggcttat

SEQ ID NO: 79770 - DNA, 40 bp, Homo sapiens
taagcctagaatctttgtcagaatcttaggaagtaatgtt

SEQ ID NO: 79771 - DNA, 40 bp, Homo sapiens
aacattacttcctaagattctgacaaagattctaggctta

SEQ ID NO: 79772 - DNA, 40 bp, Homo sapiens
aagcctagaatctttgtcagaatcttaggaagtaatgttt

SEQ ID NO: 79773 - DNA, 40 bp, Homo sapiens
aaacattacttcctaagattctgacaaagattctaggctt

SEQ ID NO: 79774 - DNA, 40 bp, Homo sapiens
agcctagaatctttgtcagaatcttaggaagtaatgtttt

SEQ ID NO: 79775 - DNA, 40 bp, Homo sapiens
aaaacattacttcctaagattctgacaaagattctaggct

SEQ ID NO: 79776 - DNA, 40 bp, Homo sapiens
gcctagaatctttgtcagaatcttaggaagtaatgttttc

SEQ ID NO: 79777 - DNA, 40 bp, Homo sapiens
gaaaacattacttcctaagattctgacaaagattctaggc

SEQ ID NO: 79778 - DNA, 40 bp, Homo sapiens
cctagaatctttgtcagaatcttaggaagtaatgttttca

SEQ ID NO: 79779 - DNA, 40 bp, Homo sapiens
tgaaaacattacttcctaagattctgacaaagattctagg

SEQ ID NO: 79780 - DNA, 40 bp, Homo sapiens
ctagaatctttgtcagaatcttaggaagtaatgttttcaa

SEQ ID NO: 79781 - DNA, 40 bp, Homo sapiens
ttgaaaacattacttcctaagattctgacaaagattctag

SEQ ID NO: 79782 - DNA, 40 bp, Homo sapiens
tagaatctttgtcagaatcttaggaagtaatgttttcaaa

SEQ ID NO: 79783 - DNA, 40 bp, Homo sapiens
tttgaaaacattacttcctaagattctgacaaagattcta

SEQ ID NO: 79784 - DNA, 40 bp, Homo sapiens
agaatctttgtcagaatcttaggaagtaatgttttcaaat

SEQ ID NO: 79785 - DNA, 40 bp, Homo sapiens
atttgaaaacattacttcctaagattctgacaaagattct

SEQ ID NO: 79786 - DNA, 40 bp, Homo sapiens
gaatctttgtcagaatcttaggaagtaatgttttcaaatt

SEQ ID NO: 79787 - DNA, 40 bp, Homo sapiens
aatttgaaaacattacttcctaagattctgacaaagattc

SEQ ID NO: 79788 - DNA, 40 bp, Homo sapiens
aatctttgtcagaatcttaggaagtaatgttttcaaattc

SEQ ID NO: 79789 - DNA, 40 bp, Homo sapiens
gaatttgaaaacattacttcctaagattctgacaaagatt

SEQ ID NO: 79790 - DNA, 40 bp, Homo sapiens
atctttgtcagaatcttaggaagtaatgttttcaaattct

SEQ ID NO: 79791 - DNA, 40 bp, Homo sapiens
agaatttgaaaacattacttcctaagattctgacaaagat

SEQ ID NO: 79792 - DNA, 40 bp, Homo sapiens
tctttgtcagaatcttaggaagtaatgttttcaaattctg

SEQ ID NO: 79793 - DNA, 40 bp, Homo sapiens
cagaatttgaaaacattacttcctaagattctgacaaaga

SEQ ID NO: 79794 - DNA, 40 bp, Homo sapiens
ctttgtcagaatcttaggaagtaatgttttcaaattctgt

SEQ ID NO: 79795 - DNA, 40 bp, Homo sapiens
acagaatttgaaaacattacttcctaagattctgacaaag

SEQ ID NO: 79796 - DNA, 40 bp, Homo sapiens
tttgtcagaatcttaggaagtaatgttttcaaattctgtg

SEQ ID NO: 79797 - DNA, 40 bp, Homo sapiens
cacagaatttgaaaacattacttcctaagattctgacaaa

SEQ ID NO: 79798 - DNA, 40 bp, Homo sapiens
ttgtcagaatcttaggaagtaatgttttcaaattctgtgt

SEQ ID NO: 79799 - DNA, 40 bp, Homo sapiens
acacagaatttgaaaacattacttcctaagattctgacaa

SEQ ID NO: 79800 - DNA, 40 bp, Homo sapiens
tgtcagaatcttaggaagtaatgttttcaaattctgtgtt

SEQ ID NO: 79801 - DNA, 40 bp, Homo sapiens
aacacagaatttgaaaacattacttcctaagattctgaca

SEQ ID NO: 79802 - DNA, 40 bp, Homo sapiens
gtcagaatcttaggaagtaatgttttcaaattctgtgttt

SEQ ID NO: 79803 - DNA, 40 bp, Homo sapiens
aaacacagaatttgaaaacattacttcctaagattctgac

SEQ ID NO: 79804 - DNA, 40 bp, Homo sapiens
tcagaatcttaggaagtaatgttttcaaattctgtgtttt

SEQ ID NO: 79805 - DNA, 40 bp, Homo sapiens
aaaacacagaatttgaaaacattacttcctaagattctga

SEQ ID NO: 79806 - DNA, 40 bp, Homo sapiens
cagaatcttaggaagtaatgttttcaaattctgtgttttc

SEQ ID NO: 79807 - DNA, 40 bp, Homo sapiens
gaaaacacagaatttgaaaacattacttcctaagattctg

SEQ ID NO: 79808 - DNA, 40 bp, Homo sapiens
agaatcttaggaagtaatgttttcaaattctgtgttttca

SEQ ID NO: 79809 - DNA, 40 bp, Homo sapiens
tgaaaacacagaatttgaaaacattacttcctaagattct

SEQ ID NO: 79810 - DNA, 40 bp, Homo sapiens
gaatcttaggaagtaatgttttcaaattctgtgttttcac

SEQ ID NO: 79811 - DNA, 40 bp, Homo sapiens
gtgaaaacacagaatttgaaaacattacttcctaagattc

SEQ ID NO: 79812 - DNA, 40 bp, Homo sapiens
aatcttaggaagtaatgttttcaaattctgtgttttcacc

SEQ ID NO: 79813 - DNA, 40 bp, Homo sapiens
ggtgaaaacacagaatttgaaaacattacttcctaagatt

SEQ ID NO: 79814 - DNA, 40 bp, Homo sapiens
atcttaggaagtaatgttttcaaattctgtgttttcacca

SEQ ID NO: 79815 - DNA, 40 bp, Homo sapiens
tggtgaaaacacagaatttgaaaacattacttcctaagat

SEQ ID NO: 79816 - DNA, 40 bp, Homo sapiens
tcttaggaagtaatgttttcaaattctgtgttttcaccat

SEQ ID NO: 79817 - DNA, 40 bp, Homo sapiens
atggtgaaaacacagaatttgaaaacattacttcctaaga

SEQ ID NO: 79818 - DNA, 40 bp, Homo sapiens
cttaggaagtaatgttttcaaattctgtgttttcaccata

SEQ ID NO: 79819 - DNA, 40 bp, Homo sapiens
tatggtgaaaacacagaatttgaaaacattacttcctaag

SEQ ID NO: 79820 - DNA, 40 bp, Homo sapiens
ttaggaagtaatgttttcaaattctgtgttttcaccataa

SEQ ID NO: 79821 - DNA, 40 bp, Homo sapiens
ttatggtgaaaacacagaatttgaaaacattacttcctaa

SEQ ID NO: 79822 - DNA, 40 bp, Homo sapiens
taggaagtaatgttttcaaattctgtgttttcaccataaa

SEQ ID NO: 79823 - DNA, 40 bp, Homo sapiens
tttatggtgaaaacacagaatttgaaaacattacttccta

SEQ ID NO: 79824 - DNA, 40 bp, Homo sapiens
aggaagtaatgttttcaaattctgtgttttcaccataaaa

SEQ ID NO: 79825 - DNA, 40 bp, Homo sapiens
ttttatggtgaaaacacagaatttgaaaacattacttcct

SEQ ID NO: 79826 - DNA, 40 bp, Homo sapiens
ggaagtaatgttttcaaattctgtgttttcaccataaaat

SEQ ID NO: 79827 - DNA, 40 bp, Homo sapiens
attttatggtgaaaacacagaatttgaaaacattacttcc

SEQ ID NO: 79828 - DNA, 40 bp, Homo sapiens
gaagtaatgttttcaaattctgtgttttcaccataaaatg

SEQ ID NO: 79829 - DNA, 40 bp, Homo sapiens
cattttatggtgaaaacacagaatttgaaaacattacttc

SEQ ID NO: 79830 - DNA, 40 bp, Homo sapiens
aagtaatgttttcaaattctgtgttttcaccataaaatgt

SEQ ID NO: 79831 - DNA, 40 bp, Homo sapiens
acattttatggtgaaaacacagaatttgaaaacattactt

SEQ ID NO: 79832 - DNA, 40 bp, Homo sapiens
agtaatgttttcaaattctgtgttttcaccataaaatgtg

SEQ ID NO: 79833 - DNA, 40 bp, Homo sapiens
cacattttatggtgaaaacacagaatttgaaaacattact

SEQ ID NO: 79834 - DNA, 40 bp, Homo sapiens
gtaatgttttcaaattctgtgttttcaccataaaatgtgt

SEQ ID NO: 79835 - DNA, 40 bp, Homo sapiens
acacattttatggtgaaaacacagaatttgaaaacattac

SEQ ID NO: 79836 - DNA, 40 bp, Homo sapiens
taatgttttcaaattctgtgttttcaccataaaatgtgtc

SEQ ID NO: 79837 - DNA, 40 bp, Homo sapiens
gacacattttatggtgaaaacacagaatttgaaaacatta

SEQ ID NO: 79838 - DNA, 40 bp, Homo sapiens
aatgttttcaaattctgtgttttcaccataaaatgtgtct

SEQ ID NO: 79839 - DNA, 40 bp, Homo sapiens
agacacattttatggtgaaaacacagaatttgaaaacatt

SEQ ID NO: 79840 - DNA, 40 bp, Homo sapiens
atgttttcaaattctgtgttttcaccataaaatgtgtctt

SEQ ID NO: 79841 - DNA, 40 bp, Homo sapiens
aagacacattttatggtgaaaacacagaatttgaaaacat

SEQ ID NO: 79842 - DNA, 40 bp, Homo sapiens
tgttttcaaattctgtgttttcaccataaaatgtgtcttc

SEQ ID NO: 79843 - DNA, 40 bp, Homo sapiens
gaagacacattttatggtgaaaacacagaatttgaaaaca

SEQ ID NO: 79844 - DNA, 40 bp, Homo sapiens
gttttcaaattctgtgttttcaccataaaatgtgtcttct

SEQ ID NO: 79845 - DNA, 40 bp, Homo sapiens
agaagacacattttatggtgaaaacacagaatttgaaaac

SEQ ID NO: 79846 - DNA, 40 bp, Homo sapiens
ttttcaaattctgtgttttcaccataaaatgtgtcttctc

SEQ ID NO: 79847 - DNA, 40 bp, Homo sapiens
gagaagacacattttatggtgaaaacacagaatttgaaaa

SEQ ID NO: 79848 - DNA, 40 bp, Homo sapiens
tttcaaattctgtgttttcaccataaaatgtgtcttctct

SEQ ID NO: 79849 - DNA, 40 bp, Homo sapiens
agagaagacacattttatggtgaaaacacagaatttgaaa

SEQ ID NO: 79850 - DNA, 40 bp, Homo sapiens
ttcaaattctgtgttttcaccataaaatgtgtcttctctg

SEQ ID NO: 79851 - DNA, 40 bp, Homo sapiens
cagagaagacacattttatggtgaaaacacagaatttgaa

SEQ ID NO: 79852 - DNA, 40 bp, Homo sapiens
tcaaattctgtgttttcaccataaaatgtgtcttctctgt

SEQ ID NO: 79853 - DNA, 40 bp, Homo sapiens
acagagaagacacattttatggtgaaaacacagaatttga

SEQ ID NO: 79854 - DNA, 40 bp, Homo sapiens
caaattctgtgttttcaccataaaatgtgtcttctctgtg

SEQ ID NO: 79855 - DNA, 40 bp, Homo sapiens
cacagagaagacacattttatggtgaaaacacagaatttg

SEQ ID NO: 79856 - DNA, 40 bp, Homo sapiens
aaattctgtgttttcaccataaaatgtgtcttctctgtgt

SEQ ID NO: 79857 - DNA, 40 bp, Homo sapiens
acacagagaagacacattttatggtgaaaacacagaattt

SEQ ID NO: 79858 - DNA, 40 bp, Homo sapiens
aattctgtgttttcaccataaaatgtgtcttctctgtgtc

SEQ ID NO: 79859 - DNA, 40 bp, Homo sapiens
gacacagagaagacacattttatggtgaaaacacagaatt

SEQ ID NO: 79860 - DNA, 40 bp, Homo sapiens
attctgtgttttcaccataaaatgtgtcttctctgtgtcc

SEQ ID NO: 79861 - DNA, 40 bp, Homo sapiens
ggacacagagaagacacattttatggtgaaaacacagaat

SEQ ID NO: 79862 - DNA, 40 bp, Homo sapiens
ttctgtgttttcaccataaaatgtgtcttctctgtgtcca

SEQ ID NO: 79863 - DNA, 40 bp, Homo sapiens
tggacacagagaagacacattttatggtgaaaacacagaa

SEQ ID NO: 79864 - DNA, 40 bp, Homo sapiens
tctgtgttttcaccataaaatgtgtcttctctgtgtccat

SEQ ID NO: 79865 - DNA, 40 bp, Homo sapiens
atggacacagagaagacacattttatggtgaaaacacaga

SEQ ID NO: 79866 - DNA, 40 bp, Homo sapiens
ctgtgttttcaccataaaatgtgtcttctctgtgtccatc

SEQ ID NO: 79867 - DNA, 40 bp, Homo sapiens
gatggacacagagaagacacattttatggtgaaaacacag

SEQ ID NO: 79868 - DNA, 40 bp, Homo sapiens
tgtgttttcaccataaaatgtgtcttctctgtgtccatca

SEQ ID NO: 79869 - DNA, 40 bp, Homo sapiens
tgatggacacagagaagacacattttatggtgaaaacaca

SEQ ID NO: 79870 - DNA, 40 bp, Homo sapiens
gtgttttcaccataaaatgtgtcttctctgtgtccatcac

SEQ ID NO: 79871 - DNA, 40 bp, Homo sapiens
gtgatggacacagagaagacacattttatggtgaaaacac

SEQ ID NO: 79872 - DNA, 40 bp, Homo sapiens
tgttttcaccataaaatgtgtcttctctgtgtccatcaca

SEQ ID NO: 79873 - DNA, 40 bp, Homo sapiens
tgtgatggacacagagaagacacattttatggtgaaaaca

SEQ ID NO: 79874 - DNA, 40 bp, Homo sapiens
gttttcaccataaaatgtgtcttctctgtgtccatcacat

SEQ ID NO: 79875 - DNA, 40 bp, Homo sapiens
atgtgatggacacagagaagacacattttatggtgaaaac

SEQ ID NO: 79876 - DNA, 40 bp, Homo sapiens
ttttcaccataaaatgtgtcttctctgtgtccatcacatg

SEQ ID NO: 79877 - DNA, 40 bp, Homo sapiens
catgtgatggacacagagaagacacattttatggtgaaaa

SEQ ID NO: 79878 - DNA, 40 bp, Homo sapiens
tttcaccataaaatgtgtcttctctgtgtccatcacatgg

SEQ ID NO: 79879 - DNA, 40 bp, Homo sapiens
ccatgtgatggacacagagaagacacattttatggtgaaa

SEQ ID NO: 79880 - DNA, 40 bp, Homo sapiens
ttcaccataaaatgtgtcttctctgtgtccatcacatggt

SEQ ID NO: 79881 - DNA, 40 bp, Homo sapiens
accatgtgatggacacagagaagacacattttatggtgaa

SEQ ID NO: 79882 - DNA, 40 bp, Homo sapiens
tcaccataaaatgtgtcttctctgtgtccatcacatggtt

SEQ ID NO: 79883 - DNA, 40 bp, Homo sapiens
aaccatgtgatggacacagagaagacacattttatggtga

SEQ ID NO: 79884 - DNA, 40 bp, Homo sapiens
caccataaaatgtgtcttctctgtgtccatcacatggttt

SEQ ID NO: 79885 - DNA, 40 bp, Homo sapiens
aaaccatgtgatggacacagagaagacacattttatggtg

SEQ ID NO: 79886 - DNA, 40 bp, Homo sapiens
accataaaatgtgtcttctctgtgtccatcacatggtttt

SEQ ID NO: 79887 - DNA, 40 bp, Homo sapiens
aaaaccatgtgatggacacagagaagacacattttatggt

SEQ ID NO: 79888 - DNA, 40 bp, Homo sapiens
ccataaaatgtgtcttctctgtgtccatcacatggttttt

SEQ ID NO: 79889 - DNA, 40 bp, Homo sapiens
aaaaaccatgtgatggacacagagaagacacattttatgg

SEQ ID NO: 79890 - DNA, 40 bp, Homo sapiens
cataaaatgtgtcttctctgtgtccatcacatggtttttc

SEQ ID NO: 79891 - DNA, 40 bp, Homo sapiens
gaaaaaccatgtgatggacacagagaagacacattttatg

SEQ ID NO: 79892 - DNA, 40 bp, Homo sapiens
ataaaatgtgtcttctctgtgtccatcacatggtttttca

SEQ ID NO: 79893 - DNA, 40 bp, Homo sapiens
tgaaaaaccatgtgatggacacagagaagacacattttat

SEQ ID NO: 79894 - DNA, 40 bp, Homo sapiens
taaaatgtgtcttctctgtgtccatcacatggtttttcat

SEQ ID NO: 79895 - DNA, 40 bp, Homo sapiens
atgaaaaaccatgtgatggacacagagaagacacatttta

SEQ ID NO: 79896 - DNA, 40 bp, Homo sapiens
aaaatgtgtcttctctgtgtccatcacatggtttttcatt

SEQ ID NO: 79897 - DNA, 40 bp, Homo sapiens
aatgaaaaaccatgtgatggacacagagaagacacatttt

SEQ ID NO: 79898 - DNA, 40 bp, Homo sapiens
aaatgtgtcttctctgtgtccatcacatggtttttcattg

SEQ ID NO: 79899 - DNA, 40 bp, Homo sapiens
caatgaaaaaccatgtgatggacacagagaagacacattt

SEQ ID NO: 79900 - DNA, 40 bp, Homo sapiens
aatgtgtcttctctgtgtccatcacatggtttttcattgt

SEQ ID NO: 79901 - DNA, 40 bp, Homo sapiens
acaatgaaaaaccatgtgatggacacagagaagacacatt

SEQ ID NO: 79902 - DNA, 40 bp, Homo sapiens
atgtgtcttctctgtgtccatcacatggtttttcattgtt

SEQ ID NO: 79903 - DNA, 40 bp, Homo sapiens
aacaatgaaaaaccatgtgatggacacagagaagacacat

SEQ ID NO: 79904 - DNA, 40 bp, Homo sapiens
tgtgtcttctctgtgtccatcacatggtttttcattgttt

SEQ ID NO: 79905 - DNA, 40 bp, Homo sapiens
aaacaatgaaaaaccatgtgatggacacagagaagacaca

SEQ ID NO: 79906 - DNA, 40 bp, Homo sapiens
gtgtcttctctgtgtccatcacatggtttttcattgtttt

SEQ ID NO: 79907 - DNA, 40 bp, Homo sapiens
aaaacaatgaaaaaccatgtgatggacacagagaagacac

SEQ ID NO: 79908 - DNA, 40 bp, Homo sapiens
tgtcttctctgtgtccatcacatggtttttcattgttttc

SEQ ID NO: 79909 - DNA, 40 bp, Homo sapiens
gaaaacaatgaaaaaccatgtgatggacacagagaagaca

SEQ ID NO: 79910 - DNA, 40 bp, Homo sapiens
gtcttctctgtgtccatcacatggtttttcattgttttct

SEQ ID NO: 79911 - DNA, 40 bp, Homo sapiens
agaaaacaatgaaaaaccatgtgatggacacagagaagac

SEQ ID NO: 79912 - DNA, 40 bp, Homo sapiens
tcttctctgtgtccatcacatggtttttcattgttttctg

SEQ ID NO: 79913 - DNA, 40 bp, Homo sapiens
cagaaaacaatgaaaaaccatgtgatggacacagagaaga

SEQ ID NO: 79914 - DNA, 40 bp, Homo sapiens
cttctctgtgtccatcacatggtttttcattgttttctgc

SEQ ID NO: 79915 - DNA, 40 bp, Homo sapiens
gcagaaaacaatgaaaaaccatgtgatggacacagagaag

SEQ ID NO: 79916 - DNA, 40 bp, Homo sapiens
ttctctgtgtccatcacatggtttttcattgttttctgct

SEQ ID NO: 79917 - DNA, 40 bp, Homo sapiens
agcagaaaacaatgaaaaaccatgtgatggacacagagaa

SEQ ID NO: 79918 - DNA, 40 bp, Homo sapiens
tctctgtgtccatcacatggtttttcattgttttctgctt

SEQ ID NO: 79919 - DNA, 40 bp, Homo sapiens
aagcagaaaacaatgaaaaaccatgtgatggacacagaga

SEQ ID NO: 79920 - DNA, 40 bp, Homo sapiens
ctctgtgtccatcacatggtttttcattgttttctgcttt

SEQ ID NO: 79921 - DNA, 40 bp, Homo sapiens
aaagcagaaaacaatgaaaaaccatgtgatggacacagag

SEQ ID NO: 79922 - DNA, 40 bp, Homo sapiens
tctgtgtccatcacatggtttttcattgttttctgcttta

SEQ ID NO: 79923 - DNA, 40 bp, Homo sapiens
taaagcagaaaacaatgaaaaaccatgtgatggacacaga

SEQ ID NO: 79924 - DNA, 40 bp, Homo sapiens
ctgtgtccatcacatggtttttcattgttttctgctttac

SEQ ID NO: 79925 - DNA, 40 bp, Homo sapiens
gtaaagcagaaaacaatgaaaaaccatgtgatggacacag

SEQ ID NO: 79926 - DNA, 40 bp, Homo sapiens
tgtgtccatcacatggtttttcattgttttctgctttacc

SEQ ID NO: 79927 - DNA, 40 bp, Homo sapiens
ggtaaagcagaaaacaatgaaaaaccatgtgatggacaca

SEQ ID NO: 79928 - DNA, 40 bp, Homo sapiens
gtgtccatcacatggtttttcattgttttctgctttacca

SEQ ID NO: 79929 - DNA, 40 bp, Homo sapiens
tggtaaagcagaaaacaatgaaaaaccatgtgatggacac

SEQ ID NO: 79930 - DNA, 40 bp, Homo sapiens
tgtccatcacatggtttttcattgttttctgctttaccat

SEQ ID NO: 79931 - DNA, 40 bp, Homo sapiens
atggtaaagcagaaaacaatgaaaaaccatgtgatggaca

SEQ ID NO: 79932 - DNA, 40 bp, Homo sapiens
gtccatcacatggtttttcattgttttctgctttaccatt

SEQ ID NO: 79933 - DNA, 40 bp, Homo sapiens
aatggtaaagcagaaaacaatgaaaaaccatgtgatggac

SEQ ID NO: 79934 - DNA, 40 bp, Homo sapiens
tccatcacatggtttttcattgttttctgctttaccattt

SEQ ID NO: 79935 - DNA, 40 bp, Homo sapiens
aaatggtaaagcagaaaacaatgaaaaaccatgtgatgga

SEQ ID NO: 79936 - DNA, 40 bp, Homo sapiens
ccatcacatggtttttcattgttttctgctttaccatttt

SEQ ID NO: 79937 - DNA, 40 bp, Homo sapiens
aaaatggtaaagcagaaaacaatgaaaaaccatgtgatgg

SEQ ID NO: 79938 - DNA, 40 bp, Homo sapiens
catcacatggtttttcattgttttctgctttaccatttta

SEQ ID NO: 79939 - DNA, 40 bp, Homo sapiens
taaaatggtaaagcagaaaacaatgaaaaaccatgtgatg

SEQ ID NO: 79940 - DNA, 40 bp, Homo sapiens
atcacatggtttttcattgttttctgctttaccattttag

SEQ ID NO: 79941 - DNA, 40 bp, Homo sapiens
ctaaaatggtaaagcagaaaacaatgaaaaaccatgtgat

SEQ ID NO: 79942 - DNA, 40 bp, Homo sapiens
tcacatggtttttcattgttttctgctttaccattttagt

SEQ ID NO: 79943 - DNA, 40 bp, Homo sapiens
actaaaatggtaaagcagaaaacaatgaaaaaccatgtga

SEQ ID NO: 79944 - DNA, 40 bp, Homo sapiens
cacatggtttttcattgttttctgctttaccattttagta

SEQ ID NO: 79945 - DNA, 40 bp, Homo sapiens
tactaaaatggtaaagcagaaaacaatgaaaaaccatgtg

SEQ ID NO: 79946 - DNA, 40 bp, Homo sapiens
acatggtttttcattgttttctgctttaccattttagtac

SEQ ID NO: 79947 - DNA, 40 bp, Homo sapiens
gtactaaaatggtaaagcagaaaacaatgaaaaaccatgt

SEQ ID NO: 79948 - DNA, 40 bp, Homo sapiens
catggtttttcattgttttctgctttaccattttagtacc

SEQ ID NO: 79949 - DNA, 40 bp, Homo sapiens
ggtactaaaatggtaaagcagaaaacaatgaaaaaccatg

SEQ ID NO: 79950 - DNA, 40 bp, Homo sapiens
atggtttttcattgttttctgctttaccattttagtacca

SEQ ID NO: 79951 - DNA, 40 bp, Homo sapiens
tggtactaaaatggtaaagcagaaaacaatgaaaaaccat

SEQ ID NO: 79952 - DNA, 40 bp, Homo sapiens
tggtttttcattgttttctgctttaccattttagtaccat

SEQ ID NO: 79953 - DNA, 40 bp, Homo sapiens
atggtactaaaatggtaaagcagaaaacaatgaaaaacca

SEQ ID NO: 79954 - DNA, 40 bp, Homo sapiens
ggtttttcattgttttctgctttaccattttagtaccatt

SEQ ID NO: 79955 - DNA, 40 bp, Homo sapiens
aatggtactaaaatggtaaagcagaaaacaatgaaaaacc

SEQ ID NO: 79956 - DNA, 40 bp, Homo sapiens
gtttttcattgttttctgctttaccattttagtaccattg

SEQ ID NO: 79957 - DNA, 40 bp, Homo sapiens
caatggtactaaaatggtaaagcagaaaacaatgaaaaac

SEQ ID NO: 79958 - DNA, 40 bp, Homo sapiens
tttttcattgttttctgctttaccattttagtaccattgg

SEQ ID NO: 79959 - DNA, 40 bp, Homo sapiens
ccaatggtactaaaatggtaaagcagaaaacaatgaaaaa

SEQ ID NO: 79960 - DNA, 40 bp, Homo sapiens
ttttcattgttttctgctttaccattttagtaccattggc

SEQ ID NO: 79961 - DNA, 40 bp, Homo sapiens
gccaatggtactaaaatggtaaagcagaaaacaatgaaaa

SEQ ID NO: 79962 - DNA, 40 bp, Homo sapiens
tttcattgttttctgctttaccattttagtaccattggca

SEQ ID NO: 79963 - DNA, 40 bp, Homo sapiens
tgccaatggtactaaaatggtaaagcagaaaacaatgaaa

SEQ ID NO: 79964 - DNA, 40 bp, Homo sapiens
ttcattgttttctgctttaccattttagtaccattggcat

SEQ ID NO: 79965 - DNA, 40 bp, Homo sapiens
atgccaatggtactaaaatggtaaagcagaaaacaatgaa

SEQ ID NO: 79966 - DNA, 40 bp, Homo sapiens
tcattgttttctgctttaccattttagtaccattggcatt

SEQ ID NO: 79967 - DNA, 40 bp, Homo sapiens
aatgccaatggtactaaaatggtaaagcagaaaacaatga

SEQ ID NO: 79968 - DNA, 40 bp, Homo sapiens
cattgttttctgctttaccattttagtaccattggcattt

SEQ ID NO: 79969 - DNA, 40 bp, Homo sapiens
aaatgccaatggtactaaaatggtaaagcagaaaacaatg

SEQ ID NO: 79970 - DNA, 40 bp, Homo sapiens
attgttttctgctttaccattttagtaccattggcatttt

SEQ ID NO: 79971 - DNA, 40 bp, Homo sapiens
aaaatgccaatggtactaaaatggtaaagcagaaaacaat

SEQ ID NO: 79972 - DNA, 40 bp, Homo sapiens
ttgttttctgctttaccattttagtaccattggcattttt

SEQ ID NO: 79973 - DNA, 40 bp, Homo sapiens
aaaaatgccaatggtactaaaatggtaaagcagaaaacaa

SEQ ID NO: 79974 - DNA, 40 bp, Homo sapiens
tgttttctgctttaccattttagtaccattggcatttttc

SEQ ID NO: 79975 - DNA, 40 bp, Homo sapiens
gaaaaatgccaatggtactaaaatggtaaagcagaaaaca

SEQ ID NO: 79976 - DNA, 40 bp, Homo sapiens
gttttctgctttaccattttagtaccattggcatttttct

SEQ ID NO: 79977 - DNA, 40 bp, Homo sapiens
agaaaaatgccaatggtactaaaatggtaaagcagaaaac

SEQ ID NO: 79978 - DNA, 40 bp, Homo sapiens
ttttctgctttaccattttagtaccattggcatttttctt

SEQ ID NO: 79979 - DNA, 40 bp, Homo sapiens
aagaaaaatgccaatggtactaaaatggtaaagcagaaaa

SEQ ID NO: 79980 - DNA, 40 bp, Homo sapiens
tttctgctttaccattttagtaccattggcatttttcttc

SEQ ID NO: 79981 - DNA, 40 bp, Homo sapiens
gaagaaaaatgccaatggtactaaaatggtaaagcagaaa

SEQ ID NO: 79982 - DNA, 40 bp, Homo sapiens
ttctgctttaccattttagtaccattggcatttttcttca

SEQ ID NO: 79983 - DNA, 40 bp, Homo sapiens
tgaagaaaaatgccaatggtactaaaatggtaaagcagaa

SEQ ID NO: 79984 - DNA, 40 bp, Homo sapiens
tctgctttaccattttagtaccattggcatttttcttcat

SEQ ID NO: 79985 - DNA, 40 bp, Homo sapiens
atgaagaaaaatgccaatggtactaaaatggtaaagcaga

SEQ ID NO: 79986 - DNA, 40 bp, Homo sapiens
ctgctttaccattttagtaccattggcatttttcttcatt

SEQ ID NO: 79987 - DNA, 40 bp, Homo sapiens
aatgaagaaaaatgccaatggtactaaaatggtaaagcag

SEQ ID NO: 79988 - DNA, 40 bp, Homo sapiens
tgctttaccattttagtaccattggcatttttcttcattg

SEQ ID NO: 79989 - DNA, 40 bp, Homo sapiens
caatgaagaaaaatgccaatggtactaaaatggtaaagca

SEQ ID NO: 79990 - DNA, 40 bp, Homo sapiens
gctttaccattttagtaccattggcatttttcttcattgt

SEQ ID NO: 79991 - DNA, 40 bp, Homo sapiens
acaatgaagaaaaatgccaatggtactaaaatggtaaagc

SEQ ID NO: 79992 - DNA, 40 bp, Homo sapiens
ctttaccattttagtaccattggcatttttcttcattgta

SEQ ID NO: 79993 - DNA, 40 bp, Homo sapiens
tacaatgaagaaaaatgccaatggtactaaaatggtaaag

SEQ ID NO: 79994 - DNA, 40 bp, Homo sapiens
tttaccattttagtaccattggcatttttcttcattgtaa

SEQ ID NO: 79995 - DNA, 40 bp, Homo sapiens
ttacaatgaagaaaaatgccaatggtactaaaatggtaaa

SEQ ID NO: 79996 - DNA, 40 bp, Homo sapiens
ttaccattttagtaccattggcatttttcttcattgtaaa

SEQ ID NO: 79997 - DNA, 40 bp, Homo sapiens
tttacaatgaagaaaaatgccaatggtactaaaatggtaa

SEQ ID NO: 79998 - DNA, 40 bp, Homo sapiens
taccattttagtaccattggcatttttcttcattgtaaaa

SEQ ID NO: 79999 - DNA, 40 bp, Homo sapiens
ttttacaatgaagaaaaatgccaatggtactaaaatggta

SEQ ID NO: 80000 - DNA, 40 bp, Homo sapiens
accattttagtaccattggcatttttcttcattgtaaaag

SEQ ID NO: 80001 - DNA, 40 bp, Homo sapiens
cttttacaatgaagaaaaatgccaatggtactaaaatggt

SEQ ID NO: 80002 - DNA, 40 bp, Homo sapiens
ccattttagtaccattggcatttttcttcattgtaaaagt

SEQ ID NO: 80003 - DNA, 40 bp, Homo sapiens
acttttacaatgaagaaaaatgccaatggtactaaaatgg

SEQ ID NO: 80004 - DNA, 40 bp, Homo sapiens
cattttagtaccattggcatttttcttcattgtaaaagta

SEQ ID NO: 80005 - DNA, 40 bp, Homo sapiens
tacttttacaatgaagaaaaatgccaatggtactaaaatg

SEQ ID NO: 80006 - DNA, 40 bp, Homo sapiens
attttagtaccattggcatttttcttcattgtaaaagtag

SEQ ID NO: 80007 - DNA, 40 bp, Homo sapiens
ctacttttacaatgaagaaaaatgccaatggtactaaaat

SEQ ID NO: 80008 - DNA, 40 bp, Homo sapiens
ttttagtaccattggcatttttcttcattgtaaaagtagt

SEQ ID NO: 80009 - DNA, 40 bp, Homo sapiens
actacttttacaatgaagaaaaatgccaatggtactaaaa

SEQ ID NO: 80010 - DNA, 40 bp, Homo sapiens
tttagtaccattggcatttttcttcattgtaaaagtagta

SEQ ID NO: 80011 - DNA, 40 bp, Homo sapiens
tactacttttacaatgaagaaaaatgccaatggtactaaa

SEQ ID NO: 80012 - DNA, 40 bp, Homo sapiens
ttagtaccattggcatttttcttcattgtaaaagtagtag

SEQ ID NO: 80013 - DNA, 40 bp, Homo sapiens
ctactacttttacaatgaagaaaaatgccaatggtactaa

SEQ ID NO: 80014 - DNA, 40 bp, Homo sapiens
tagtaccattggcatttttcttcattgtaaaagtagtaga

SEQ ID NO: 80015 - DNA, 40 bp, Homo sapiens
tctactacttttacaatgaagaaaaatgccaatggtacta

SEQ ID NO: 80016 - DNA, 40 bp, Homo sapiens
agtaccattggcatttttcttcattgtaaaagtagtagaa

SEQ ID NO: 80017 - DNA, 40 bp, Homo sapiens
ttctactacttttacaatgaagaaaaatgccaatggtact

SEQ ID NO: 80018 - DNA, 40 bp, Homo sapiens
gtaccattggcatttttcttcattgtaaaagtagtagaaa

SEQ ID NO: 80019 - DNA, 40 bp, Homo sapiens
tttctactacttttacaatgaagaaaaatgccaatggtac

SEQ ID NO: 80020 - DNA, 40 bp, Homo sapiens
taccattggcatttttcttcattgtaaaagtagtagaaat

SEQ ID NO: 80021 - DNA, 40 bp, Homo sapiens
atttctactacttttacaatgaagaaaaatgccaatggta

SEQ ID NO: 80022 - DNA, 40 bp, Homo sapiens
accattggcatttttcttcattgtaaaagtagtagaaatg

SEQ ID NO: 80023 - DNA, 40 bp, Homo sapiens
catttctactacttttacaatgaagaaaaatgccaatggt

SEQ ID NO: 80024 - DNA, 40 bp, Homo sapiens
ccattggcatttttcttcattgtaaaagtagtagaaatgg

SEQ ID NO: 80025 - DNA, 40 bp, Homo sapiens
ccatttctactacttttacaatgaagaaaaatgccaatgg

SEQ ID NO: 80026 - DNA, 40 bp, Homo sapiens
cattggcatttttcttcattgtaaaagtagtagaaatgga

SEQ ID NO: 80027 - DNA, 40 bp, Homo sapiens
tccatttctactacttttacaatgaagaaaaatgccaatg

SEQ ID NO: 80028 - DNA, 40 bp, Homo sapiens
attggcatttttcttcattgtaaaagtagtagaaatggag

SEQ ID NO: 80029 - DNA, 40 bp, Homo sapiens
ctccatttctactacttttacaatgaagaaaaatgccaat

SEQ ID NO: 80030 - DNA, 40 bp, Homo sapiens
ttggcatttttcttcattgtaaaagtagtagaaatggagt

SEQ ID NO: 80031 - DNA, 40 bp, Homo sapiens
actccatttctactacttttacaatgaagaaaaatgccaa

SEQ ID NO: 80032 - DNA, 40 bp, Homo sapiens
tggcatttttcttcattgtaaaagtagtagaaatggagta

SEQ ID NO: 80033 - DNA, 40 bp, Homo sapiens
tactccatttctactacttttacaatgaagaaaaatgcca

SEQ ID NO: 80034 - DNA, 40 bp, Homo sapiens
ggcatttttcttcattgtaaaagtagtagaaatggagtag

SEQ ID NO: 80035 - DNA, 40 bp, Homo sapiens
ctactccatttctactacttttacaatgaagaaaaatgcc

SEQ ID NO: 80036 - DNA, 40 bp, Homo sapiens
gcatttttcttcattgtaaaagtagtagaaatggagtaga

SEQ ID NO: 80037 - DNA, 40 bp, Homo sapiens
tctactccatttctactacttttacaatgaagaaaaatgc

SEQ ID NO: 80038 - DNA, 40 bp, Homo sapiens
catttttcttcattgtaaaagtagtagaaatggagtagat

SEQ ID NO: 80039 - DNA, 40 bp, Homo sapiens
atctactccatttctactacttttacaatgaagaaaaatg

SEQ ID NO: 80040 - DNA, 40 bp, Homo sapiens
atttttcttcattgtaaaagtagtagaaatggagtagatt

SEQ ID NO: 80041 - DNA, 40 bp, Homo sapiens
aatctactccatttctactacttttacaatgaagaaaaat

SEQ ID NO: 80042 - DNA, 40 bp, Homo sapiens
tttttcttcattgtaaaagtagtagaaatggagtagatta

SEQ ID NO: 80043 - DNA, 40 bp, Homo sapiens
taatctactccatttctactacttttacaatgaagaaaaa

SEQ ID NO: 80044 - DNA, 40 bp, Homo sapiens
ttttcttcattgtaaaagtagtagaaatggagtagattac

SEQ ID NO: 80045 - DNA, 40 bp, Homo sapiens
gtaatctactccatttctactacttttacaatgaagaaaa

SEQ ID NO: 80046 - DNA, 40 bp, Homo sapiens
tttcttcattgtaaaagtagtagaaatggagtagattaca

SEQ ID NO: 80047 - DNA, 40 bp, Homo sapiens
tgtaatctactccatttctactacttttacaatgaagaaa

SEQ ID NO: 80048 - DNA, 40 bp, Homo sapiens
ttcttcattgtaaaagtagtagaaatggagtagattacat

SEQ ID NO: 80049 - DNA, 40 bp, Homo sapiens
atgtaatctactccatttctactacttttacaatgaagaa

SEQ ID NO: 80050 - DNA, 40 bp, Homo sapiens
tcttcattgtaaaagtagtagaaatggagtagattacata

SEQ ID NO: 80051 - DNA, 40 bp, Homo sapiens
tatgtaatctactccatttctactacttttacaatgaaga

SEQ ID NO: 80052 - DNA, 40 bp, Homo sapiens
cttcattgtaaaagtagtagaaatggagtagattacataa

SEQ ID NO: 80053 - DNA, 40 bp, Homo sapiens
ttatgtaatctactccatttctactacttttacaatgaag

SEQ ID NO: 80054 - DNA, 40 bp, Homo sapiens
ttcattgtaaaagtagtagaaatggagtagattacataag

SEQ ID NO: 80055 - DNA, 40 bp, Homo sapiens
cttatgtaatctactccatttctactacttttacaatgaa

SEQ ID NO: 80056 - DNA, 40 bp, Homo sapiens
tcattgtaaaagtagtagaaatggagtagattacataagg

SEQ ID NO: 80057 - DNA, 40 bp, Homo sapiens
ccttatgtaatctactccatttctactacttttacaatga

SEQ ID NO: 80058 - DNA, 40 bp, Homo sapiens
cattgtaaaagtagtagaaatggagtagattacataagga

SEQ ID NO: 80059 - DNA, 40 bp, Homo sapiens
tccttatgtaatctactccatttctactacttttacaatg

SEQ ID NO: 80060 - DNA, 40 bp, Homo sapiens
attgtaaaagtagtagaaatggagtagattacataaggat

SEQ ID NO: 80061 - DNA, 40 bp, Homo sapiens
atccttatgtaatctactccatttctactacttttacaat

SEQ ID NO: 80062 - DNA, 40 bp, Homo sapiens
ttgtaaaagtagtagaaatggagtagattacataaggatg

SEQ ID NO: 80063 - DNA, 40 bp, Homo sapiens
catccttatgtaatctactccatttctactacttttacaa

SEQ ID NO: 80064 - DNA, 40 bp, Homo sapiens
tgtaaaagtagtagaaatggagtagattacataaggatgt

SEQ ID NO: 80065 - DNA, 40 bp, Homo sapiens
acatccttatgtaatctactccatttctactacttttaca

SEQ ID NO: 80066 - DNA, 40 bp, Homo sapiens
gtaaaagtagtagaaatggagtagattacataaggatgtg

SEQ ID NO: 80067 - DNA, 40 bp, Homo sapiens
cacatccttatgtaatctactccatttctactacttttac

SEQ ID NO: 80068 - DNA, 40 bp, Homo sapiens
taaaagtagtagaaatggagtagattacataaggatgtga

SEQ ID NO: 80069 - DNA, 40 bp, Homo sapiens
tcacatccttatgtaatctactccatttctactactttta

SEQ ID NO: 80070 - DNA, 40 bp, Homo sapiens
aaaagtagtagaaatggagtagattacataaggatgtgat

SEQ ID NO: 80071 - DNA, 40 bp, Homo sapiens
atcacatccttatgtaatctactccatttctactactttt

SEQ ID NO: 80072 - DNA, 40 bp, Homo sapiens
aaagtagtagaaatggagtagattacataaggatgtgatc

SEQ ID NO: 80073 - DNA, 40 bp, Homo sapiens
gatcacatccttatgtaatctactccatttctactacttt

SEQ ID NO: 80074 - DNA, 40 bp, Homo sapiens
aagtagtagaaatggagtagattacataaggatgtgatca

SEQ ID NO: 80075 - DNA, 40 bp, Homo sapiens
tgatcacatccttatgtaatctactccatttctactactt

SEQ ID NO: 80076 - DNA, 40 bp, Homo sapiens
agtagtagaaatggagtagattacataaggatgtgatcag

SEQ ID NO: 80077 - DNA, 40 bp, Homo sapiens
ctgatcacatccttatgtaatctactccatttctactact

SEQ ID NO: 80078 - DNA, 40 bp, Homo sapiens
gtagtagaaatggagtagattacataaggatgtgatcaga

SEQ ID NO: 80079 - DNA, 40 bp, Homo sapiens
tctgatcacatccttatgtaatctactccatttctactac

SEQ ID NO: 80080 - DNA, 40 bp, Homo sapiens
tagtagaaatggagtagattacataaggatgtgatcagag

SEQ ID NO: 80081 - DNA, 40 bp, Homo sapiens
ctctgatcacatccttatgtaatctactccatttctacta

SEQ ID NO: 80082 - DNA, 40 bp, Homo sapiens
agtagaaatggagtagattacataaggatgtgatcagagg

SEQ ID NO: 80083 - DNA, 40 bp, Homo sapiens
cctctgatcacatccttatgtaatctactccatttctact

SEQ ID NO: 80084 - DNA, 40 bp, Homo sapiens
gtagaaatggagtagattacataaggatgtgatcagaggg

SEQ ID NO: 80085 - DNA, 40 bp, Homo sapiens
ccctctgatcacatccttatgtaatctactccatttctac

SEQ ID NO: 80086 - DNA, 40 bp, Homo sapiens
tagaaatggagtagattacataaggatgtgatcagaggga

SEQ ID NO: 80087 - DNA, 40 bp, Homo sapiens
tccctctgatcacatccttatgtaatctactccatttcta

SEQ ID NO: 80088 - DNA, 40 bp, Homo sapiens
agaaatggagtagattacataaggatgtgatcagagggaa

SEQ ID NO: 80089 - DNA, 40 bp, Homo sapiens
ttccctctgatcacatccttatgtaatctactccatttct

SEQ ID NO: 80090 - DNA, 40 bp, Homo sapiens
gaaatggagtagattacataaggatgtgatcagagggaat

SEQ ID NO: 80091 - DNA, 40 bp, Homo sapiens
attccctctgatcacatccttatgtaatctactccatttc

SEQ ID NO: 80092 - DNA, 40 bp, Homo sapiens
aaatggagtagattacataaggatgtgatcagagggaatt

SEQ ID NO: 80093 - DNA, 40 bp, Homo sapiens
aattccctctgatcacatccttatgtaatctactccattt

SEQ ID NO: 80094 - DNA, 40 bp, Homo sapiens
aatggagtagattacataaggatgtgatcagagggaattt

SEQ ID NO: 80095 - DNA, 40 bp, Homo sapiens
aaattccctctgatcacatccttatgtaatctactccatt

SEQ ID NO: 80096 - DNA, 40 bp, Homo sapiens
atggagtagattacataaggatgtgatcagagggaattta

SEQ ID NO: 80097 - DNA, 40 bp, Homo sapiens
taaattccctctgatcacatccttatgtaatctactccat

SEQ ID NO: 80098 - DNA, 40 bp, Homo sapiens
tggagtagattacataaggatgtgatcagagggaatttat

SEQ ID NO: 80099 - DNA, 40 bp, Homo sapiens
ataaattccctctgatcacatccttatgtaatctactcca

SEQ ID NO: 80100 - DNA, 40 bp, Homo sapiens
ggagtagattacataaggatgtgatcagagggaatttatt

SEQ ID NO: 80101 - DNA, 40 bp, Homo sapiens
aataaattccctctgatcacatccttatgtaatctactcc

SEQ ID NO: 80102 - DNA, 40 bp, Homo sapiens
gagtagattacataaggatgtgatcagagggaatttattc

SEQ ID NO: 80103 - DNA, 40 bp, Homo sapiens
gaataaattccctctgatcacatccttatgtaatctactc

SEQ ID NO: 80104 - DNA, 40 bp, Homo sapiens
agtagattacataaggatgtgatcagagggaatttattca

SEQ ID NO: 80105 - DNA, 40 bp, Homo sapiens
tgaataaattccctctgatcacatccttatgtaatctact

SEQ ID NO: 80106 - DNA, 40 bp, Homo sapiens
gtagattacataaggatgtgatcagagggaatttattcat

SEQ ID NO: 80107 - DNA, 40 bp, Homo sapiens
atgaataaattccctctgatcacatccttatgtaatctac

SEQ ID NO: 80108 - DNA, 40 bp, Homo sapiens
tagattacataaggatgtgatcagagggaatttattcatt

SEQ ID NO: 80109 - DNA, 40 bp, Homo sapiens
aatgaataaattccctctgatcacatccttatgtaatcta

SEQ ID NO: 80110 - DNA, 40 bp, Homo sapiens
agattacataaggatgtgatcagagggaatttattcattc

SEQ ID NO: 80111 - DNA, 40 bp, Homo sapiens
gaatgaataaattccctctgatcacatccttatgtaatct

SEQ ID NO: 80112 - DNA, 40 bp, Homo sapiens
gattacataaggatgtgatcagagggaatttattcattca

SEQ ID NO: 80113 - DNA, 40 bp, Homo sapiens
tgaatgaataaattccctctgatcacatccttatgtaatc

SEQ ID NO: 80114 - DNA, 40 bp, Homo sapiens
attacataaggatgtgatcagagggaatttattcattcag

SEQ ID NO: 80115 - DNA, 40 bp, Homo sapiens
ctgaatgaataaattccctctgatcacatccttatgtaat

SEQ ID NO: 80116 - DNA, 40 bp, Homo sapiens
ttacataaggatgtgatcagagggaatttattcattcagg

SEQ ID NO: 80117 - DNA, 40 bp, Homo sapiens
cctgaatgaataaattccctctgatcacatccttatgtaa

SEQ ID NO: 80118 - DNA, 40 bp, Homo sapiens
tacataaggatgtgatcagagggaatttattcattcaggg

SEQ ID NO: 80119 - DNA, 40 bp, Homo sapiens
ccctgaatgaataaattccctctgatcacatccttatgta

SEQ ID NO: 80120 - DNA, 40 bp, Homo sapiens
acataaggatgtgatcagagggaatttattcattcagggt

SEQ ID NO: 80121 - DNA, 40 bp, Homo sapiens
accctgaatgaataaattccctctgatcacatccttatgt

SEQ ID NO: 80122 - DNA, 40 bp, Homo sapiens
cataaggatgtgatcagagggaatttattcattcagggta

SEQ ID NO: 80123 - DNA, 40 bp, Homo sapiens
taccctgaatgaataaattccctctgatcacatccttatg

SEQ ID NO: 80124 - DNA, 40 bp, Homo sapiens
ataaggatgtgatcagagggaatttattcattcagggtaa

SEQ ID NO: 80125 - DNA, 40 bp, Homo sapiens
ttaccctgaatgaataaattccctctgatcacatccttat

SEQ ID NO: 80126 - DNA, 40 bp, Homo sapiens
taaggatgtgatcagagggaatttattcattcagggtaag

SEQ ID NO: 80127 - DNA, 40 bp, Homo sapiens
cttaccctgaatgaataaattccctctgatcacatcctta

SEQ ID NO: 80128 - DNA, 40 bp, Homo sapiens
aaggatgtgatcagagggaatttattcattcagggtaagg

SEQ ID NO: 80129 - DNA, 40 bp, Homo sapiens
ccttaccctgaatgaataaattccctctgatcacatcctt

SEQ ID NO: 80130 - DNA, 40 bp, Homo sapiens
aggatgtgatcagagggaatttattcattcagggtaaggg

SEQ ID NO: 80131 - DNA, 40 bp, Homo sapiens
cccttaccctgaatgaataaattccctctgatcacatcct

SEQ ID NO: 80132 - DNA, 40 bp, Homo sapiens
ggatgtgatcagagggaatttattcattcagggtaaggga

SEQ ID NO: 80133 - DNA, 40 bp, Homo sapiens
tcccttaccctgaatgaataaattccctctgatcacatcc

SEQ ID NO: 80134 - DNA, 40 bp, Homo sapiens
gatgtgatcagagggaatttattcattcagggtaagggag

SEQ ID NO: 80135 - DNA, 40 bp, Homo sapiens
ctcccttaccctgaatgaataaattccctctgatcacatc

SEQ ID NO: 80136 - DNA, 40 bp, Homo sapiens
atgtgatcagagggaatttattcattcagggtaagggagt

SEQ ID NO: 80137 - DNA, 40 bp, Homo sapiens
actcccttaccctgaatgaataaattccctctgatcacat

SEQ ID NO: 80138 - DNA, 40 bp, Homo sapiens
tgtgatcagagggaatttattcattcagggtaagggagtt

SEQ ID NO: 80139 - DNA, 40 bp, Homo sapiens
aactcccttaccctgaatgaataaattccctctgatcaca

SEQ ID NO: 80140 - DNA, 40 bp, Homo sapiens
gtgatcagagggaatttattcattcagggtaagggagtta

SEQ ID NO: 80141 - DNA, 40 bp, Homo sapiens
taactcccttaccctgaatgaataaattccctctgatcac

SEQ ID NO: 80142 - DNA, 40 bp, Homo sapiens
tgatcagagggaatttattcattcagggtaagggagttag

SEQ ID NO: 80143 - DNA, 40 bp, Homo sapiens
ctaactcccttaccctgaatgaataaattccctctgatca

SEQ ID NO: 80144 - DNA, 40 bp, Homo sapiens
gatcagagggaatttattcattcagggtaagggagttaga

SEQ ID NO: 80145 - DNA, 40 bp, Homo sapiens
tctaactcccttaccctgaatgaataaattccctctgatc

SEQ ID NO: 80146 - DNA, 40 bp, Homo sapiens
atcagagggaatttattcattcagggtaagggagttagat

SEQ ID NO: 80147 - DNA, 40 bp, Homo sapiens
atctaactcccttaccctgaatgaataaattccctctgat

SEQ ID NO: 80148 - DNA, 40 bp, Homo sapiens
tcagagggaatttattcattcagggtaagggagttagatc

SEQ ID NO: 80149 - DNA, 40 bp, Homo sapiens
gatctaactcccttaccctgaatgaataaattccctctga

SEQ ID NO: 80150 - DNA, 40 bp, Homo sapiens
cagagggaatttattcattcagggtaagggagttagatcc

SEQ ID NO: 80151 - DNA, 40 bp, Homo sapiens
ggatctaactcccttaccctgaatgaataaattccctctg

SEQ ID NO: 80152 - DNA, 40 bp, Homo sapiens
agagggaatttattcattcagggtaagggagttagatcct

SEQ ID NO: 80153 - DNA, 40 bp, Homo sapiens
aggatctaactcccttaccctgaatgaataaattccctct

SEQ ID NO: 80154 - DNA, 40 bp, Homo sapiens
gagggaatttattcattcagggtaagggagttagatcctc

SEQ ID NO: 80155 - DNA, 40 bp, Homo sapiens
gaggatctaactcccttaccctgaatgaataaattccctc

SEQ ID NO: 80156 - DNA, 40 bp, Homo sapiens
agggaatttattcattcagggtaagggagttagatcctct

SEQ ID NO: 80157 - DNA, 40 bp, Homo sapiens
agaggatctaactcccttaccctgaatgaataaattccct

SEQ ID NO: 80158 - DNA, 40 bp, Homo sapiens
gggaatttattcattcagggtaagggagttagatcctctt

SEQ ID NO: 80159 - DNA, 40 bp, Homo sapiens
aagaggatctaactcccttaccctgaatgaataaattccc

SEQ ID NO: 80160 - DNA, 40 bp, Homo sapiens
ggaatttattcattcagggtaagggagttagatcctcttt

SEQ ID NO: 80161 - DNA, 40 bp, Homo sapiens
aaagaggatctaactcccttaccctgaatgaataaattcc

SEQ ID NO: 80162 - DNA, 40 bp, Homo sapiens
gaatttattcattcagggtaagggagttagatcctctttt

SEQ ID NO: 80163 - DNA, 40 bp, Homo sapiens
aaaagaggatctaactcccttaccctgaatgaataaattc

SEQ ID NO: 80164 - DNA, 40 bp, Homo sapiens
aatttattcattcagggtaagggagttagatcctctttta

SEQ ID NO: 80165 - DNA, 40 bp, Homo sapiens
taaaagaggatctaactcccttaccctgaatgaataaatt

SEQ ID NO: 80166 - DNA, 40 bp, Homo sapiens
atttattcattcagggtaagggagttagatcctcttttaa

SEQ ID NO: 80167 - DNA, 40 bp, Homo sapiens
ttaaaagaggatctaactcccttaccctgaatgaataaat

SEQ ID NO: 80168 - DNA, 40 bp, Homo sapiens
tttattcattcagggtaagggagttagatcctcttttaag

SEQ ID NO: 80169 - DNA, 40 bp, Homo sapiens
cttaaaagaggatctaactcccttaccctgaatgaataaa

SEQ ID NO: 80170 - DNA, 40 bp, Homo sapiens
ttattcattcagggtaagggagttagatcctcttttaaga

SEQ ID NO: 80171 - DNA, 40 bp, Homo sapiens
tcttaaaagaggatctaactcccttaccctgaatgaataa

SEQ ID NO: 80172 - DNA, 40 bp, Homo sapiens
tattcattcagggtaagggagttagatcctcttttaagat

SEQ ID NO: 80173 - DNA, 40 bp, Homo sapiens
atcttaaaagaggatctaactcccttaccctgaatgaata

SEQ ID NO: 80174 - DNA, 40 bp, Homo sapiens
attcattcagggtaagggagttagatcctcttttaagatt

SEQ ID NO: 80175 - DNA, 40 bp, Homo sapiens
aatcttaaaagaggatctaactcccttaccctgaatgaat

SEQ ID NO: 80176 - DNA, 40 bp, Homo sapiens
ttcattcagggtaagggagttagatcctcttttaagattc

SEQ ID NO: 80177 - DNA, 40 bp, Homo sapiens
gaatcttaaaagaggatctaactcccttaccctgaatgaa

SEQ ID NO: 80178 - DNA, 40 bp, Homo sapiens
tcattcagggtaagggagttagatcctcttttaagattct

SEQ ID NO: 80179 - DNA, 40 bp, Homo sapiens
agaatcttaaaagaggatctaactcccttaccctgaatga

SEQ ID NO: 80180 - DNA, 40 bp, Homo sapiens
cattcagggtaagggagttagatcctcttttaagattcta

SEQ ID NO: 80181 - DNA, 40 bp, Homo sapiens
tagaatcttaaaagaggatctaactcccttaccctgaatg

SEQ ID NO: 80182 - DNA, 40 bp, Homo sapiens
attcagggtaagggagttagatcctcttttaagattctat

SEQ ID NO: 80183 - DNA, 40 bp, Homo sapiens
atagaatcttaaaagaggatctaactcccttaccctgaat

SEQ ID NO: 80184 - DNA, 40 bp, Homo sapiens
ttcagggtaagggagttagatcctcttttaagattctatc

SEQ ID NO: 80185 - DNA, 40 bp, Homo sapiens
gatagaatcttaaaagaggatctaactcccttaccctgaa

SEQ ID NO: 80186 - DNA, 40 bp, Homo sapiens
tcagggtaagggagttagatcctcttttaagattctatca

SEQ ID NO: 80187 - DNA, 40 bp, Homo sapiens
tgatagaatcttaaaagaggatctaactcccttaccctga

SEQ ID NO: 80188 - DNA, 40 bp, Homo sapiens
cagggtaagggagttagatcctcttttaagattctatcac

SEQ ID NO: 80189 - DNA, 40 bp, Homo sapiens
gtgatagaatcttaaaagaggatctaactcccttaccctg

SEQ ID NO: 80190 - DNA, 40 bp, Homo sapiens
agggtaagggagttagatcctcttttaagattctatcaca

SEQ ID NO: 80191 - DNA, 40 bp, Homo sapiens
tgtgatagaatcttaaaagaggatctaactcccttaccct

SEQ ID NO: 80192 - DNA, 40 bp, Homo sapiens
gggtaagggagttagatcctcttttaagattctatcacat

SEQ ID NO: 80193 - DNA, 40 bp, Homo sapiens
atgtgatagaatcttaaaagaggatctaactcccttaccc

SEQ ID NO: 80194 - DNA, 40 bp, Homo sapiens
ggtaagggagttagatcctcttttaagattctatcacatt

SEQ ID NO: 80195 - DNA, 40 bp, Homo sapiens
aatgtgatagaatcttaaaagaggatctaactcccttacc

SEQ ID NO: 80196 - DNA, 40 bp, Homo sapiens
gtaagggagttagatcctcttttaagattctatcacattc

SEQ ID NO: 80197 - DNA, 40 bp, Homo sapiens
gaatgtgatagaatcttaaaagaggatctaactcccttac

SEQ ID NO: 80198 - DNA, 40 bp, Homo sapiens
taagggagttagatcctcttttaagattctatcacattct

SEQ ID NO: 80199 - DNA, 40 bp, Homo sapiens
agaatgtgatagaatcttaaaagaggatctaactccctta

SEQ ID NO: 80200 - DNA, 40 bp, Homo sapiens
aagggagttagatcctcttttaagattctatcacattcta

SEQ ID NO: 80201 - DNA, 40 bp, Homo sapiens
tagaatgtgatagaatcttaaaagaggatctaactccctt

SEQ ID NO: 80202 - DNA, 40 bp, Homo sapiens
agggagttagatcctcttttaagattctatcacattctaa

SEQ ID NO: 80203 - DNA, 40 bp, Homo sapiens
ttagaatgtgatagaatcttaaaagaggatctaactccct

SEQ ID NO: 80204 - DNA, 40 bp, Homo sapiens
gggagttagatcctcttttaagattctatcacattctaag

SEQ ID NO: 80205 - DNA, 40 bp, Homo sapiens
cttagaatgtgatagaatcttaaaagaggatctaactccc

SEQ ID NO: 80206 - DNA, 40 bp, Homo sapiens
ggagttagatcctcttttaagattctatcacattctaagg

SEQ ID NO: 80207 - DNA, 40 bp, Homo sapiens
ccttagaatgtgatagaatcttaaaagaggatctaactcc

SEQ ID NO: 80208 - DNA, 40 bp, Homo sapiens
gagttagatcctcttttaagattctatcacattctaaggg

SEQ ID NO: 80209 - DNA, 40 bp, Homo sapiens
cccttagaatgtgatagaatcttaaaagaggatctaactc

SEQ ID NO: 80210 - DNA, 40 bp, Homo sapiens
agttagatcctcttttaagattctatcacattctaagggt

SEQ ID NO: 80211 - DNA, 40 bp, Homo sapiens
acccttagaatgtgatagaatcttaaaagaggatctaact

SEQ ID NO: 80212 - DNA, 40 bp, Homo sapiens
gttagatcctcttttaagattctatcacattctaagggtt

SEQ ID NO: 80213 - DNA, 40 bp, Homo sapiens
aacccttagaatgtgatagaatcttaaaagaggatctaac

SEQ ID NO: 80214 - DNA, 40 bp, Homo sapiens
ttagatcctcttttaagattctatcacattctaagggttt

SEQ ID NO: 80215 - DNA, 40 bp, Homo sapiens
aaacccttagaatgtgatagaatcttaaaagaggatctaa

SEQ ID NO: 80216 - DNA, 40 bp, Homo sapiens
tagatcctcttttaagattctatcacattctaagggttta

SEQ ID NO: 80217 - DNA, 40 bp, Homo sapiens
taaacccttagaatgtgatagaatcttaaaagaggatcta

SEQ ID NO: 80218 - DNA, 40 bp, Homo sapiens
agatcctcttttaagattctatcacattctaagggtttat

SEQ ID NO: 80219 - DNA, 40 bp, Homo sapiens
ataaacccttagaatgtgatagaatcttaaaagaggatct

SEQ ID NO: 80220 - DNA, 40 bp, Homo sapiens
gatcctcttttaagattctatcacattctaagggtttatg

SEQ ID NO: 80221 - DNA, 40 bp, Homo sapiens
cataaacccttagaatgtgatagaatcttaaaagaggatc

SEQ ID NO: 80222 - DNA, 40 bp, Homo sapiens
atcctcttttaagattctatcacattctaagggtttatga

SEQ ID NO: 80223 - DNA, 40 bp, Homo sapiens
tcataaacccttagaatgtgatagaatcttaaaagaggat

SEQ ID NO: 80224 - DNA, 40 bp, Homo sapiens
tcctcttttaagattctatcacattctaagggtttatgat

SEQ ID NO: 80225 - DNA, 40 bp, Homo sapiens
atcataaacccttagaatgtgatagaatcttaaaagagga

SEQ ID NO: 80226 - DNA, 40 bp, Homo sapiens
cctcttttaagattctatcacattctaagggtttatgatt

SEQ ID NO: 80227 - DNA, 40 bp, Homo sapiens
aatcataaacccttagaatgtgatagaatcttaaaagagg

SEQ ID NO: 80228 - DNA, 40 bp, Homo sapiens
ctcttttaagattctatcacattctaagggtttatgattc

SEQ ID NO: 80229 - DNA, 40 bp, Homo sapiens
gaatcataaacccttagaatgtgatagaatcttaaaagag

SEQ ID NO: 80230 - DNA, 40 bp, Homo sapiens
tcttttaagattctatcacattctaagggtttatgattct

SEQ ID NO: 80231 - DNA, 40 bp, Homo sapiens
agaatcataaacccttagaatgtgatagaatcttaaaaga

SEQ ID NO: 80232 - DNA, 40 bp, Homo sapiens
cttttaagattctatcacattctaagggtttatgattcta

SEQ ID NO: 80233 - DNA, 40 bp, Homo sapiens
tagaatcataaacccttagaatgtgatagaatcttaaaag

SEQ ID NO: 80234 - DNA, 40 bp, Homo sapiens
ttttaagattctatcacattctaagggtttatgattctaa

SEQ ID NO: 80235 - DNA, 40 bp, Homo sapiens
ttagaatcataaacccttagaatgtgatagaatcttaaaa

SEQ ID NO: 80236 - DNA, 40 bp, Homo sapiens
tttaagattctatcacattctaagggtttatgattctaaa

SEQ ID NO: 80237 - DNA, 40 bp, Homo sapiens
tttagaatcataaacccttagaatgtgatagaatcttaaa

SEQ ID NO: 80238 - DNA, 40 bp, Homo sapiens
ttaagattctatcacattctaagggtttatgattctaaac

SEQ ID NO: 80239 - DNA, 40 bp, Homo sapiens
gtttagaatcataaacccttagaatgtgatagaatcttaa

SEQ ID NO: 80240 - DNA, 40 bp, Homo sapiens
taagattctatcacattctaagggtttatgattctaaact

SEQ ID NO: 80241 - DNA, 40 bp, Homo sapiens
agtttagaatcataaacccttagaatgtgatagaatctta

SEQ ID NO: 80242 - DNA, 40 bp, Homo sapiens
aagattctatcacattctaagggtttatgattctaaactg

SEQ ID NO: 80243 - DNA, 40 bp, Homo sapiens
cagtttagaatcataaacccttagaatgtgatagaatctt

SEQ ID NO: 80244 - DNA, 40 bp, Homo sapiens
agattctatcacattctaagggtttatgattctaaactgt

SEQ ID NO: 80245 - DNA, 40 bp, Homo sapiens
acagtttagaatcataaacccttagaatgtgatagaatct

SEQ ID NO: 80246 - DNA, 40 bp, Homo sapiens
gattctatcacattctaagggtttatgattctaaactgtc

SEQ ID NO: 80247 - DNA, 40 bp, Homo sapiens
gacagtttagaatcataaacccttagaatgtgatagaatc

SEQ ID NO: 80248 - DNA, 40 bp, Homo sapiens
attctatcacattctaagggtttatgattctaaactgtca

SEQ ID NO: 80249 - DNA, 40 bp, Homo sapiens
tgacagtttagaatcataaacccttagaatgtgatagaat

SEQ ID NO: 80250 - DNA, 40 bp, Homo sapiens
ttctatcacattctaagggtttatgattctaaactgtcaa

SEQ ID NO: 80251 - DNA, 40 bp, Homo sapiens
ttgacagtttagaatcataaacccttagaatgtgatagaa

SEQ ID NO: 80252 - DNA, 40 bp, Homo sapiens
tctatcacattctaagggtttatgattctaaactgtcaag

SEQ ID NO: 80253 - DNA, 40 bp, Homo sapiens
cttgacagtttagaatcataaacccttagaatgtgataga

SEQ ID NO: 80254 - DNA, 40 bp, Homo sapiens
ctatcacattctaagggtttatgattctaaactgtcaagt

SEQ ID NO: 80255 - DNA, 40 bp, Homo sapiens
acttgacagtttagaatcataaacccttagaatgtgatag

SEQ ID NO: 80256 - DNA, 40 bp, Homo sapiens
tatcacattctaagggtttatgattctaaactgtcaagta

SEQ ID NO: 80257 - DNA, 40 bp, Homo sapiens
tacttgacagtttagaatcataaacccttagaatgtgata

SEQ ID NO: 80258 - DNA, 40 bp, Homo sapiens
atcacattctaagggtttatgattctaaactgtcaagtaa

SEQ ID NO: 80259 - DNA, 40 bp, Homo sapiens
ttacttgacagtttagaatcataaacccttagaatgtgat

SEQ ID NO: 80260 - DNA, 40 bp, Homo sapiens
tcacattctaagggtttatgattctaaactgtcaagtaaa

SEQ ID NO: 80261 - DNA, 40 bp, Homo sapiens
tttacttgacagtttagaatcataaacccttagaatgtga

SEQ ID NO: 80262 - DNA, 40 bp, Homo sapiens
cacattctaagggtttatgattctaaactgtcaagtaaat

SEQ ID NO: 80263 - DNA, 40 bp, Homo sapiens
atttacttgacagtttagaatcataaacccttagaatgtg

SEQ ID NO: 80264 - DNA, 40 bp, Homo sapiens
acattctaagggtttatgattctaaactgtcaagtaaatt

SEQ ID NO: 80265 - DNA, 40 bp, Homo sapiens
aatttacttgacagtttagaatcataaacccttagaatgt

SEQ ID NO: 80266 - DNA, 40 bp, Homo sapiens
cattctaagggtttatgattctaaactgtcaagtaaattg

SEQ ID NO: 80267 - DNA, 40 bp, Homo sapiens
caatttacttgacagtttagaatcataaacccttagaatg

SEQ ID NO: 80268 - DNA, 40 bp, Homo sapiens
attctaagggtttatgattctaaactgtcaagtaaattgt

SEQ ID NO: 80269 - DNA, 40 bp, Homo sapiens
acaatttacttgacagtttagaatcataaacccttagaat

SEQ ID NO: 80270 - DNA, 40 bp, Homo sapiens
ttctaagggtttatgattctaaactgtcaagtaaattgtc

SEQ ID NO: 80271 - DNA, 40 bp, Homo sapiens
gacaatttacttgacagtttagaatcataaacccttagaa

SEQ ID NO: 80272 - DNA, 40 bp, Homo sapiens
tctaagggtttatgattctaaactgtcaagtaaattgtca

SEQ ID NO: 80273 - DNA, 40 bp, Homo sapiens
tgacaatttacttgacagtttagaatcataaacccttaga

SEQ ID NO: 80274 - DNA, 40 bp, Homo sapiens
ctaagggtttatgattctaaactgtcaagtaaattgtcaa

SEQ ID NO: 80275 - DNA, 40 bp, Homo sapiens
ttgacaatttacttgacagtttagaatcataaacccttag

SEQ ID NO: 80276 - DNA, 40 bp, Homo sapiens
taagggtttatgattctaaactgtcaagtaaattgtcaag

SEQ ID NO: 80277 - DNA, 40 bp, Homo sapiens
cttgacaatttacttgacagtttagaatcataaaccctta

SEQ ID NO: 80278 - DNA, 40 bp, Homo sapiens
aagggtttatgattctaaactgtcaagtaaattgtcaagt

SEQ ID NO: 80279 - DNA, 40 bp, Homo sapiens
acttgacaatttacttgacagtttagaatcataaaccctt

SEQ ID NO: 80280 - DNA, 40 bp, Homo sapiens
agggtttatgattctaaactgtcaagtaaattgtcaagtg

SEQ ID NO: 80281 - DNA, 40 bp, Homo sapiens
cacttgacaatttacttgacagtttagaatcataaaccct

SEQ ID NO: 80282 - DNA, 40 bp, Homo sapiens
gggtttatgattctaaactgtcaagtaaattgtcaagtgc

SEQ ID NO: 80283 - DNA, 40 bp, Homo sapiens
gcacttgacaatttacttgacagtttagaatcataaaccc

SEQ ID NO: 80284 - DNA, 40 bp, Homo sapiens
ggtttatgattctaaactgtcaagtaaattgtcaagtgct

SEQ ID NO: 80285 - DNA, 40 bp, Homo sapiens
agcacttgacaatttacttgacagtttagaatcataaacc

SEQ ID NO: 80286 - DNA, 40 bp, Homo sapiens
gtttatgattctaaactgtcaagtaaattgtcaagtgctg

SEQ ID NO: 80287 - DNA, 40 bp, Homo sapiens
cagcacttgacaatttacttgacagtttagaatcataaac

SEQ ID NO: 80288 - DNA, 40 bp, Homo sapiens
tttatgattctaaactgtcaagtaaattgtcaagtgctgg

SEQ ID NO: 80289 - DNA, 40 bp, Homo sapiens
ccagcacttgacaatttacttgacagtttagaatcataaa

SEQ ID NO: 80290 - DNA, 40 bp, Homo sapiens
ttatgattctaaactgtcaagtaaattgtcaagtgctggc

SEQ ID NO: 80291 - DNA, 40 bp, Homo sapiens
gccagcacttgacaatttacttgacagtttagaatcataa

SEQ ID NO: 80292 - DNA, 40 bp, Homo sapiens
tatgattctaaactgtcaagtaaattgtcaagtgctggca

SEQ ID NO: 80293 - DNA, 40 bp, Homo sapiens
tgccagcacttgacaatttacttgacagtttagaatcata

SEQ ID NO: 80294 - DNA, 40 bp, Homo sapiens
atgattctaaactgtcaagtaaattgtcaagtgctggcaa

SEQ ID NO: 80295 - DNA, 40 bp, Homo sapiens
ttgccagcacttgacaatttacttgacagtttagaatcat

SEQ ID NO: 80296 - DNA, 40 bp, Homo sapiens
tgattctaaactgtcaagtaaattgtcaagtgctggcaag

SEQ ID NO: 80297 - DNA, 40 bp, Homo sapiens
cttgccagcacttgacaatttacttgacagtttagaatca

SEQ ID NO: 80298 - DNA, 40 bp, Homo sapiens
gattctaaactgtcaagtaaattgtcaagtgctggcaagc

SEQ ID NO: 80299 - DNA, 40 bp, Homo sapiens
gcttgccagcacttgacaatttacttgacagtttagaatc

SEQ ID NO: 80300 - DNA, 40 bp, Homo sapiens
attctaaactgtcaagtaaattgtcaagtgctggcaagct

SEQ ID NO: 80301 - DNA, 40 bp, Homo sapiens
agcttgccagcacttgacaatttacttgacagtttagaat

SEQ ID NO: 80302 - DNA, 40 bp, Homo sapiens
ttctaaactgtcaagtaaattgtcaagtgctggcaagcta

SEQ ID NO: 80303 - DNA, 40 bp, Homo sapiens
tagcttgccagcacttgacaatttacttgacagtttagaa

SEQ ID NO: 80304 - DNA, 40 bp, Homo sapiens
tctaaactgtcaagtaaattgtcaagtgctggcaagctac

SEQ ID NO: 80305 - DNA, 40 bp, Homo sapiens
gtagcttgccagcacttgacaatttacttgacagtttaga

SEQ ID NO: 80306 - DNA, 40 bp, Homo sapiens
ctaaactgtcaagtaaattgtcaagtgctggcaagctaca

SEQ ID NO: 80307 - DNA, 40 bp, Homo sapiens
tgtagcttgccagcacttgacaatttacttgacagtttag

SEQ ID NO: 80308 - DNA, 40 bp, Homo sapiens
taaactgtcaagtaaattgtcaagtgctggcaagctacag

SEQ ID NO: 80309 - DNA, 40 bp, Homo sapiens
ctgtagcttgccagcacttgacaatttacttgacagttta

SEQ ID NO: 80310 - DNA, 40 bp, Homo sapiens
aaactgtcaagtaaattgtcaagtgctggcaagctacaga

SEQ ID NO: 80311 - DNA, 40 bp, Homo sapiens
tctgtagcttgccagcacttgacaatttacttgacagttt

SEQ ID NO: 80312 - DNA, 40 bp, Homo sapiens
aactgtcaagtaaattgtcaagtgctggcaagctacagaa

SEQ ID NO: 80313 - DNA, 40 bp, Homo sapiens
ttctgtagcttgccagcacttgacaatttacttgacagtt

SEQ ID NO: 80314 - DNA, 40 bp, Homo sapiens
actgtcaagtaaattgtcaagtgctggcaagctacagaat

SEQ ID NO: 80315 - DNA, 40 bp, Homo sapiens
attctgtagcttgccagcacttgacaatttacttgacagt

SEQ ID NO: 80316 - DNA, 40 bp, Homo sapiens
ctgtcaagtaaattgtcaagtgctggcaagctacagaata

SEQ ID NO: 80317 - DNA, 40 bp, Homo sapiens
tattctgtagcttgccagcacttgacaatttacttgacag

SEQ ID NO: 80318 - DNA, 40 bp, Homo sapiens
tgtcaagtaaattgtcaagtgctggcaagctacagaataa

SEQ ID NO: 80319 - DNA, 40 bp, Homo sapiens
ttattctgtagcttgccagcacttgacaatttacttgaca

SEQ ID NO: 80320 - DNA, 40 bp, Homo sapiens
gtcaagtaaattgtcaagtgctggcaagctacagaataat

SEQ ID NO: 80321 - DNA, 40 bp, Homo sapiens
attattctgtagcttgccagcacttgacaatttacttgac

SEQ ID NO: 80322 - DNA, 40 bp, Homo sapiens
tcaagtaaattgtcaagtgctggcaagctacagaataatt

SEQ ID NO: 80323 - DNA, 40 bp, Homo sapiens
aattattctgtagcttgccagcacttgacaatttacttga

SEQ ID NO: 80324 - DNA, 40 bp, Homo sapiens
caagtaaattgtcaagtgctggcaagctacagaataattt

SEQ ID NO: 80325 - DNA, 40 bp, Homo sapiens
aaattattctgtagcttgccagcacttgacaatttacttg

SEQ ID NO: 80326 - DNA, 40 bp, Homo sapiens
aagtaaattgtcaagtgctggcaagctacagaataatttt

SEQ ID NO: 80327 - DNA, 40 bp, Homo sapiens
aaaattattctgtagcttgccagcacttgacaatttactt

SEQ ID NO: 80328 - DNA, 40 bp, Homo sapiens
agtaaattgtcaagtgctggcaagctacagaataattttt

SEQ ID NO: 80329 - DNA, 40 bp, Homo sapiens
aaaaattattctgtagcttgccagcacttgacaatttact

SEQ ID NO: 80330 - DNA, 40 bp, Homo sapiens
gtaaattgtcaagtgctggcaagctacagaataattttta

SEQ ID NO: 80331 - DNA, 40 bp, Homo sapiens
taaaaattattctgtagcttgccagcacttgacaatttac

SEQ ID NO: 80332 - DNA, 40 bp, Homo sapiens
taaattgtcaagtgctggcaagctacagaataatttttat

SEQ ID NO: 80333 - DNA, 40 bp, Homo sapiens
ataaaaattattctgtagcttgccagcacttgacaattta

SEQ ID NO: 80334 - DNA, 40 bp, Homo sapiens
aaattgtcaagtgctggcaagctacagaataatttttatt

SEQ ID NO: 80335 - DNA, 40 bp, Homo sapiens
aataaaaattattctgtagcttgccagcacttgacaattt

SEQ ID NO: 80336 - DNA, 40 bp, Homo sapiens
aattgtcaagtgctggcaagctacagaataatttttattg

SEQ ID NO: 80337 - DNA, 40 bp, Homo sapiens
caataaaaattattctgtagcttgccagcacttgacaatt

SEQ ID NO: 80338 - DNA, 40 bp, Homo sapiens
attgtcaagtgctggcaagctacagaataatttttattgt

SEQ ID NO: 80339 - DNA, 40 bp, Homo sapiens
acaataaaaattattctgtagcttgccagcacttgacaat

SEQ ID NO: 80340 - DNA, 40 bp, Homo sapiens
ttgtcaagtgctggcaagctacagaataatttttattgta

SEQ ID NO: 80341 - DNA, 40 bp, Homo sapiens
tacaataaaaattattctgtagcttgccagcacttgacaa

SEQ ID NO: 80342 - DNA, 40 bp, Homo sapiens
tgtcaagtgctggcaagctacagaataatttttattgtat

SEQ ID NO: 80343 - DNA, 40 bp, Homo sapiens
atacaataaaaattattctgtagcttgccagcacttgaca

SEQ ID NO: 80344 - DNA, 40 bp, Homo sapiens
gtcaagtgctggcaagctacagaataatttttattgtatc

SEQ ID NO: 80345 - DNA, 40 bp, Homo sapiens
gatacaataaaaattattctgtagcttgccagcacttgac

SEQ ID NO: 80346 - DNA, 40 bp, Homo sapiens
tcaagtgctggcaagctacagaataatttttattgtatca

SEQ ID NO: 80347 - DNA, 40 bp, Homo sapiens
tgatacaataaaaattattctgtagcttgccagcacttga

SEQ ID NO: 80348 - DNA, 40 bp, Homo sapiens
caagtgctggcaagctacagaataatttttattgtatcat

SEQ ID NO: 80349 - DNA, 40 bp, Homo sapiens
atgatacaataaaaattattctgtagcttgccagcacttg

SEQ ID NO: 80350 - DNA, 40 bp, Homo sapiens
aagtgctggcaagctacagaataatttttattgtatcatt

SEQ ID NO: 80351 - DNA, 40 bp, Homo sapiens
aatgatacaataaaaattattctgtagcttgccagcactt

SEQ ID NO: 80352 - DNA, 40 bp, Homo sapiens
agtgctggcaagctacagaataatttttattgtatcattg

SEQ ID NO: 80353 - DNA, 40 bp, Homo sapiens
caatgatacaataaaaattattctgtagcttgccagcact

SEQ ID NO: 80354 - DNA, 40 bp, Homo sapiens
gtgctggcaagctacagaataatttttattgtatcattgg

SEQ ID NO: 80355 - DNA, 40 bp, Homo sapiens
ccaatgatacaataaaaattattctgtagcttgccagcac

SEQ ID NO: 80356 - DNA, 40 bp, Homo sapiens
tgctggcaagctacagaataatttttattgtatcattgga

SEQ ID NO: 80357 - DNA, 40 bp, Homo sapiens
tccaatgatacaataaaaattattctgtagcttgccagca

SEQ ID NO: 80358 - DNA, 40 bp, Homo sapiens
gctggcaagctacagaataatttttattgtatcattggaa

SEQ ID NO: 80359 - DNA, 40 bp, Homo sapiens
ttccaatgatacaataaaaattattctgtagcttgccagc

SEQ ID NO: 80360 - DNA, 40 bp, Homo sapiens
ctggcaagctacagaataatttttattgtatcattggaaa

SEQ ID NO: 80361 - DNA, 40 bp, Homo sapiens
tttccaatgatacaataaaaattattctgtagcttgccag

SEQ ID NO: 80362 - DNA, 40 bp, Homo sapiens
tggcaagctacagaataatttttattgtatcattggaaat

SEQ ID NO: 80363 - DNA, 40 bp, Homo sapiens
atttccaatgatacaataaaaattattctgtagcttgcca

SEQ ID NO: 80364 - DNA, 40 bp, Homo sapiens
ggcaagctacagaataatttttattgtatcattggaaatt

SEQ ID NO: 80365 - DNA, 40 bp, Homo sapiens
aatttccaatgatacaataaaaattattctgtagcttgcc

SEQ ID NO: 80366 - DNA, 40 bp, Homo sapiens
gcaagctacagaataatttttattgtatcattggaaattt

SEQ ID NO: 80367 - DNA, 40 bp, Homo sapiens
aaatttccaatgatacaataaaaattattctgtagcttgc

SEQ ID NO: 80368 - DNA, 40 bp, Homo sapiens
caagctacagaataatttttattgtatcattggaaatttt

SEQ ID NO: 80369 - DNA, 40 bp, Homo sapiens
aaaatttccaatgatacaataaaaattattctgtagcttg

SEQ ID NO: 80370 - DNA, 40 bp, Homo sapiens
aagctacagaataatttttattgtatcattggaaattttc

SEQ ID NO: 80371 - DNA, 40 bp, Homo sapiens
gaaaatttccaatgatacaataaaaattattctgtagctt

SEQ ID NO: 80372 - DNA, 40 bp, Homo sapiens
agctacagaataatttttattgtatcattggaaattttcc

SEQ ID NO: 80373 - DNA, 40 bp, Homo sapiens
ggaaaatttccaatgatacaataaaaattattctgtagct

SEQ ID NO: 80374 - DNA, 40 bp, Homo sapiens
gctacagaataatttttattgtatcattggaaattttccc

SEQ ID NO: 80375 - DNA, 40 bp, Homo sapiens
gggaaaatttccaatgatacaataaaaattattctgtagc

SEQ ID NO: 80376 - DNA, 40 bp, Homo sapiens
ctacagaataatttttattgtatcattggaaattttcccc

SEQ ID NO: 80377 - DNA, 40 bp, Homo sapiens
ggggaaaatttccaatgatacaataaaaattattctgtag

SEQ ID NO: 80378 - DNA, 40 bp, Homo sapiens
tacagaataatttttattgtatcattggaaattttcccct

SEQ ID NO: 80379 - DNA, 40 bp, Homo sapiens
aggggaaaatttccaatgatacaataaaaattattctgta

SEQ ID NO: 80380 - DNA, 40 bp, Homo sapiens
acagaataatttttattgtatcattggaaattttcccctc

SEQ ID NO: 80381 - DNA, 40 bp, Homo sapiens
gaggggaaaatttccaatgatacaataaaaattattctgt

SEQ ID NO: 80382 - DNA, 40 bp, Homo sapiens
cagaataatttttattgtatcattggaaattttcccctct

SEQ ID NO: 80383 - DNA, 40 bp, Homo sapiens
agaggggaaaatttccaatgatacaataaaaattattctg

SEQ ID NO: 80384 - DNA, 40 bp, Homo sapiens
agaataatttttattgtatcattggaaattttcccctcta

SEQ ID NO: 80385 - DNA, 40 bp, Homo sapiens
tagaggggaaaatttccaatgatacaataaaaattattct

SEQ ID NO: 80386 - DNA, 40 bp, Homo sapiens
gaataatttttattgtatcattggaaattttcccctctat

SEQ ID NO: 80387 - DNA, 40 bp, Homo sapiens
atagaggggaaaatttccaatgatacaataaaaattattc

SEQ ID NO: 80388 - DNA, 40 bp, Homo sapiens
aataatttttattgtatcattggaaattttcccctctata

SEQ ID NO: 80389 - DNA, 40 bp, Homo sapiens
tatagaggggaaaatttccaatgatacaataaaaattatt

SEQ ID NO: 80390 - DNA, 40 bp, Homo sapiens
ataatttttattgtatcattggaaattttcccctctatat

SEQ ID NO: 80391 - DNA, 40 bp, Homo sapiens
atatagaggggaaaatttccaatgatacaataaaaattat

SEQ ID NO: 80392 - DNA, 40 bp, Homo sapiens
taatttttattgtatcattggaaattttcccctctatatg

SEQ ID NO: 80393 - DNA, 40 bp, Homo sapiens
catatagaggggaaaatttccaatgatacaataaaaatta

SEQ ID NO: 80394 - DNA, 40 bp, Homo sapiens
aatttttattgtatcattggaaattttcccctctatatgt

SEQ ID NO: 80395 - DNA, 40 bp, Homo sapiens
acatatagaggggaaaatttccaatgatacaataaaaatt

SEQ ID NO: 80396 - DNA, 40 bp, Homo sapiens
atttttattgtatcattggaaattttcccctctatatgtg

SEQ ID NO: 80397 - DNA, 40 bp, Homo sapiens
cacatatagaggggaaaatttccaatgatacaataaaaat

SEQ ID NO: 80398 - DNA, 40 bp, Homo sapiens
tttttattgtatcattggaaattttcccctctatatgtgt

SEQ ID NO: 80399 - DNA, 40 bp, Homo sapiens
acacatatagaggggaaaatttccaatgatacaataaaaa

SEQ ID NO: 80400 - DNA, 40 bp, Homo sapiens
ttttattgtatcattggaaattttcccctctatatgtgtt

SEQ ID NO: 80401 - DNA, 40 bp, Homo sapiens
aacacatatagaggggaaaatttccaatgatacaataaaa

SEQ ID NO: 80402 - DNA, 40 bp, Homo sapiens
tttattgtatcattggaaattttcccctctatatgtgtta

SEQ ID NO: 80403 - DNA, 40 bp, Homo sapiens
taacacatatagaggggaaaatttccaatgatacaataaa

SEQ ID NO: 80404 - DNA, 40 bp, Homo sapiens
ttattgtatcattggaaattttcccctctatatgtgttaa

SEQ ID NO: 80405 - DNA, 40 bp, Homo sapiens
ttaacacatatagaggggaaaatttccaatgatacaataa

SEQ ID NO: 80406 - DNA, 40 bp, Homo sapiens
tattgtatcattggaaattttcccctctatatgtgttaaa

SEQ ID NO: 80407 - DNA, 40 bp, Homo sapiens
tttaacacatatagaggggaaaatttccaatgatacaata

SEQ ID NO: 80408 - DNA, 40 bp, Homo sapiens
attgtatcattggaaattttcccctctatatgtgttaaag

SEQ ID NO: 80409 - DNA, 40 bp, Homo sapiens
ctttaacacatatagaggggaaaatttccaatgatacaat

SEQ ID NO: 80410 - DNA, 40 bp, Homo sapiens
ttgtatcattggaaattttcccctctatatgtgttaaaga

SEQ ID NO: 80411 - DNA, 40 bp, Homo sapiens
tctttaacacatatagaggggaaaatttccaatgatacaa

SEQ ID NO: 80412 - DNA, 40 bp, Homo sapiens
tgtatcattggaaattttcccctctatatgtgttaaagag

SEQ ID NO: 80413 - DNA, 40 bp, Homo sapiens
ctctttaacacatatagaggggaaaatttccaatgataca

SEQ ID NO: 80414 - DNA, 40 bp, Homo sapiens
gtatcattggaaattttcccctctatatgtgttaaagagt

SEQ ID NO: 80415 - DNA, 40 bp, Homo sapiens
actctttaacacatatagaggggaaaatttccaatgatac

SEQ ID NO: 80416 - DNA, 40 bp, Homo sapiens
tatcattggaaattttcccctctatatgtgttaaagagtt

SEQ ID NO: 80417 - DNA, 40 bp, Homo sapiens
aactctttaacacatatagaggggaaaatttccaatgata

SEQ ID NO: 80418 - DNA, 40 bp, Homo sapiens
atcattggaaattttcccctctatatgtgttaaagagttt

SEQ ID NO: 80419 - DNA, 40 bp, Homo sapiens
aaactctttaacacatatagaggggaaaatttccaatgat

SEQ ID NO: 80420 - DNA, 40 bp, Homo sapiens
tcattggaaattttcccctctatatgtgttaaagagttta

SEQ ID NO: 80421 - DNA, 40 bp, Homo sapiens
taaactctttaacacatatagaggggaaaatttccaatga

SEQ ID NO: 80422 - DNA, 40 bp, Homo sapiens
cattggaaattttcccctctatatgtgttaaagagtttag

SEQ ID NO: 80423 - DNA, 40 bp, Homo sapiens
ctaaactctttaacacatatagaggggaaaatttccaatg

SEQ ID NO: 80424 - DNA, 40 bp, Homo sapiens
attggaaattttcccctctatatgtgttaaagagtttagc

SEQ ID NO: 80425 - DNA, 40 bp, Homo sapiens
gctaaactctttaacacatatagaggggaaaatttccaat

SEQ ID NO: 80426 - DNA, 40 bp, Homo sapiens
ttggaaattttcccctctatatgtgttaaagagtttagcc

SEQ ID NO: 80427 - DNA, 40 bp, Homo sapiens
ggctaaactctttaacacatatagaggggaaaatttccaa

SEQ ID NO: 80428 - DNA, 40 bp, Homo sapiens
tggaaattttcccctctatatgtgttaaagagtttagcct

SEQ ID NO: 80429 - DNA, 40 bp, Homo sapiens
aggctaaactctttaacacatatagaggggaaaatttcca

SEQ ID NO: 80430 - DNA, 40 bp, Homo sapiens
ggaaattttcccctctatatgtgttaaagagtttagcctg

SEQ ID NO: 80431 - DNA, 40 bp, Homo sapiens
caggctaaactctttaacacatatagaggggaaaatttcc

SEQ ID NO: 80432 - DNA, 40 bp, Homo sapiens
gaaattttcccctctatatgtgttaaagagtttagcctga

SEQ ID NO: 80433 - DNA, 40 bp, Homo sapiens
tcaggctaaactctttaacacatatagaggggaaaatttc

SEQ ID NO: 80434 - DNA, 40 bp, Homo sapiens
aaattttcccctctatatgtgttaaagagtttagcctgaa

SEQ ID NO: 80435 - DNA, 40 bp, Homo sapiens
ttcaggctaaactctttaacacatatagaggggaaaattt

SEQ ID NO: 80436 - DNA, 40 bp, Homo sapiens
aattttcccctctatatgtgttaaagagtttagcctgaag

SEQ ID NO: 80437 - DNA, 40 bp, Homo sapiens
cttcaggctaaactctttaacacatatagaggggaaaatt

SEQ ID NO: 80438 - DNA, 40 bp, Homo sapiens
attttcccctctatatgtgttaaagagtttagcctgaagg

SEQ ID NO: 80439 - DNA, 40 bp, Homo sapiens
ccttcaggctaaactctttaacacatatagaggggaaaat

SEQ ID NO: 80440 - DNA, 40 bp, Homo sapiens
ttttcccctctatatgtgttaaagagtttagcctgaaggg

SEQ ID NO: 80441 - DNA, 40 bp, Homo sapiens
cccttcaggctaaactctttaacacatatagaggggaaaa

SEQ ID NO: 80442 - DNA, 40 bp, Homo sapiens
tttcccctctatatgtgttaaagagtttagcctgaaggga

SEQ ID NO: 80443 - DNA, 40 bp, Homo sapiens
tcccttcaggctaaactctttaacacatatagaggggaaa

SEQ ID NO: 80444 - DNA, 40 bp, Homo sapiens
ttcccctctatatgtgttaaagagtttagcctgaagggat

SEQ ID NO: 80445 - DNA, 40 bp, Homo sapiens
atcccttcaggctaaactctttaacacatatagaggggaa

SEQ ID NO: 80446 - DNA, 40 bp, Homo sapiens
tcccctctatatgtgttaaagagtttagcctgaagggata

SEQ ID NO: 80447 - DNA, 40 bp, Homo sapiens
tatcccttcaggctaaactctttaacacatatagagggga

SEQ ID NO: 80448 - DNA, 40 bp, Homo sapiens
cccctctatatgtgttaaagagtttagcctgaagggatac

SEQ ID NO: 80449 - DNA, 40 bp, Homo sapiens
gtatcccttcaggctaaactctttaacacatatagagggg

SEQ ID NO: 80450 - DNA, 40 bp, Homo sapiens
ccctctatatgtgttaaagagtttagcctgaagggataca

SEQ ID NO: 80451 - DNA, 40 bp, Homo sapiens
tgtatcccttcaggctaaactctttaacacatatagaggg

SEQ ID NO: 80452 - DNA, 40 bp, Homo sapiens
cctctatatgtgttaaagagtttagcctgaagggatacat

SEQ ID NO: 80453 - DNA, 40 bp, Homo sapiens
atgtatcccttcaggctaaactctttaacacatatagagg

SEQ ID NO: 80454 - DNA, 40 bp, Homo sapiens
ctctatatgtgttaaagagtttagcctgaagggatacata

SEQ ID NO: 80455 - DNA, 40 bp, Homo sapiens
tatgtatcccttcaggctaaactctttaacacatatagag

SEQ ID NO: 80456 - DNA, 40 bp, Homo sapiens
tctatatgtgttaaagagtttagcctgaagggatacatac

SEQ ID NO: 80457 - DNA, 40 bp, Homo sapiens
gtatgtatcccttcaggctaaactctttaacacatataga

SEQ ID NO: 80458 - DNA, 40 bp, Homo sapiens
ctatatgtgttaaagagtttagcctgaagggatacataca

SEQ ID NO: 80459 - DNA, 40 bp, Homo sapiens
tgtatgtatcccttcaggctaaactctttaacacatatag

SEQ ID NO: 80460 - DNA, 40 bp, Homo sapiens
tatatgtgttaaagagtttagcctgaagggatacatacac

SEQ ID NO: 80461 - DNA, 40 bp, Homo sapiens
gtgtatgtatcccttcaggctaaactctttaacacatata

SEQ ID NO: 80462 - DNA, 40 bp, Homo sapiens
atatgtgttaaagagtttagcctgaagggatacatacaca

SEQ ID NO: 80463 - DNA, 40 bp, Homo sapiens
tgtgtatgtatcccttcaggctaaactctttaacacatat

SEQ ID NO: 80464 - DNA, 40 bp, Homo sapiens
tatgtgttaaagagtttagcctgaagggatacatacacat

SEQ ID NO: 80465 - DNA, 40 bp, Homo sapiens
atgtgtatgtatcccttcaggctaaactctttaacacata

SEQ ID NO: 80466 - DNA, 40 bp, Homo sapiens
atgtgttaaagagtttagcctgaagggatacatacacata

SEQ ID NO: 80467 - DNA, 40 bp, Homo sapiens
tatgtgtatgtatcccttcaggctaaactctttaacacat

SEQ ID NO: 80468 - DNA, 40 bp, Homo sapiens
tgtgttaaagagtttagcctgaagggatacatacacatac

SEQ ID NO: 80469 - DNA, 40 bp, Homo sapiens
gtatgtgtatgtatcccttcaggctaaactctttaacaca

SEQ ID NO: 80470 - DNA, 40 bp, Homo sapiens
gtgttaaagagtttagcctgaagggatacatacacataca

SEQ ID NO: 80471 - DNA, 40 bp, Homo sapiens
tgtatgtgtatgtatcccttcaggctaaactctttaacac

SEQ ID NO: 80472 - DNA, 40 bp, Homo sapiens
tgttaaagagtttagcctgaagggatacatacacatacat

SEQ ID NO: 80473 - DNA, 40 bp, Homo sapiens
atgtatgtgtatgtatcccttcaggctaaactctttaaca

SEQ ID NO: 80474 - DNA, 40 bp, Homo sapiens
gttaaagagtttagcctgaagggatacatacacatacata

SEQ ID NO: 80475 - DNA, 40 bp, Homo sapiens
tatgtatgtgtatgtatcccttcaggctaaactctttaac

SEQ ID NO: 80476 - DNA, 40 bp, Homo sapiens
ttaaagagtttagcctgaagggatacatacacatacatat

SEQ ID NO: 80477 - DNA, 40 bp, Homo sapiens
atatgtatgtgtatgtatcccttcaggctaaactctttaa

SEQ ID NO: 80478 - DNA, 40 bp, Homo sapiens
taaagagtttagcctgaagggatacatacacatacatata

SEQ ID NO: 80479 - DNA, 40 bp, Homo sapiens
tatatgtatgtgtatgtatcccttcaggctaaactcttta

SEQ ID NO: 80480 - DNA, 40 bp, Homo sapiens
aaagagtttagcctgaagggatacatacacatacatatat

SEQ ID NO: 80481 - DNA, 40 bp, Homo sapiens
atatatgtatgtgtatgtatcccttcaggctaaactcttt

SEQ ID NO: 80482 - DNA, 40 bp, Homo sapiens
aagagtttagcctgaagggatacatacacatacatatatg

SEQ ID NO: 80483 - DNA, 40 bp, Homo sapiens
catatatgtatgtgtatgtatcccttcaggctaaactctt

SEQ ID NO: 80484 - DNA, 40 bp, Homo sapiens
agagtttagcctgaagggatacatacacatacatatatgt

SEQ ID NO: 80485 - DNA, 40 bp, Homo sapiens
acatatatgtatgtgtatgtatcccttcaggctaaactct

SEQ ID NO: 80486 - DNA, 40 bp, Homo sapiens
gagtttagcctgaagggatacatacacatacatatatgta

SEQ ID NO: 80487 - DNA, 40 bp, Homo sapiens
tacatatatgtatgtgtatgtatcccttcaggctaaactc

SEQ ID NO: 80488 - DNA, 40 bp, Homo sapiens
agtttagcctgaagggatacatacacatacatatatgtaa

SEQ ID NO: 80489 - DNA, 40 bp, Homo sapiens
ttacatatatgtatgtgtatgtatcccttcaggctaaact

SEQ ID NO: 80490 - DNA, 40 bp, Homo sapiens
gtttagcctgaagggatacatacacatacatatatgtaat

SEQ ID NO: 80491 - DNA, 40 bp, Homo sapiens
attacatatatgtatgtgtatgtatcccttcaggctaaac

SEQ ID NO: 80492 - DNA, 40 bp, Homo sapiens
tttagcctgaagggatacatacacatacatatatgtaatc

SEQ ID NO: 80493 - DNA, 40 bp, Homo sapiens
gattacatatatgtatgtgtatgtatcccttcaggctaaa

SEQ ID NO: 80494 - DNA, 40 bp, Homo sapiens
ttagcctgaagggatacatacacatacatatatgtaatca

SEQ ID NO: 80495 - DNA, 40 bp, Homo sapiens
tgattacatatatgtatgtgtatgtatcccttcaggctaa

SEQ ID NO: 80496 - DNA, 40 bp, Homo sapiens
tagcctgaagggatacatacacatacatatatgtaatcaa

SEQ ID NO: 80497 - DNA, 40 bp, Homo sapiens
ttgattacatatatgtatgtgtatgtatcccttcaggcta

SEQ ID NO: 80498 - DNA, 40 bp, Homo sapiens
agcctgaagggatacatacacatacatatatgtaatcaaa

SEQ ID NO: 80499 - DNA, 40 bp, Homo sapiens
tttgattacatatatgtatgtgtatgtatcccttcaggct

SEQ ID NO: 80500 - DNA, 40 bp, Homo sapiens
gcctgaagggatacatacacatacatatatgtaatcaaac

SEQ ID NO: 80501 - DNA, 40 bp, Homo sapiens
gtttgattacatatatgtatgtgtatgtatcccttcaggc

SEQ ID NO: 80502 - DNA, 40 bp, Homo sapiens
cctgaagggatacatacacatacatatatgtaatcaaacc

SEQ ID NO: 80503 - DNA, 40 bp, Homo sapiens
ggtttgattacatatatgtatgtgtatgtatcccttcagg

SEQ ID NO: 80504 - DNA, 40 bp, Homo sapiens
ctgaagggatacatacacatacatatatgtaatcaaacct

SEQ ID NO: 80505 - DNA, 40 bp, Homo sapiens
aggtttgattacatatatgtatgtgtatgtatcccttcag

SEQ ID NO: 80506 - DNA, 40 bp, Homo sapiens
tgaagggatacatacacatacatatatgtaatcaaacctt

SEQ ID NO: 80507 - DNA, 40 bp, Homo sapiens
aaggtttgattacatatatgtatgtgtatgtatcccttca

SEQ ID NO: 80508 - DNA, 40 bp, Homo sapiens
gaagggatacatacacatacatatatgtaatcaaaccttg

SEQ ID NO: 80509 - DNA, 40 bp, Homo sapiens
caaggtttgattacatatatgtatgtgtatgtatcccttc

SEQ ID NO: 80510 - DNA, 40 bp, Homo sapiens
aagggatacatacacatacatatatgtaatcaaaccttga

SEQ ID NO: 80511 - DNA, 40 bp, Homo sapiens
tcaaggtttgattacatatatgtatgtgtatgtatccctt

SEQ ID NO: 80512 - DNA, 40 bp, Homo sapiens
agggatacatacacatacatatatgtaatcaaaccttgat

SEQ ID NO: 80513 - DNA, 40 bp, Homo sapiens
atcaaggtttgattacatatatgtatgtgtatgtatccct

SEQ ID NO: 80514 - DNA, 40 bp, Homo sapiens
gggatacatacacatacatatatgtaatcaaaccttgatg

SEQ ID NO: 80515 - DNA, 40 bp, Homo sapiens
catcaaggtttgattacatatatgtatgtgtatgtatccc

SEQ ID NO: 80516 - DNA, 40 bp, Homo sapiens
ggatacatacacatacatatatgtaatcaaaccttgatgg

SEQ ID NO: 80517 - DNA, 40 bp, Homo sapiens
ccatcaaggtttgattacatatatgtatgtgtatgtatcc

SEQ ID NO: 80518 - DNA, 40 bp, Homo sapiens
gatacatacacatacatatatgtaatcaaaccttgatggt

SEQ ID NO: 80519 - DNA, 40 bp, Homo sapiens
accatcaaggtttgattacatatatgtatgtgtatgtatc

SEQ ID NO: 80520 - DNA, 40 bp, Homo sapiens
atacatacacatacatatatgtaatcaaaccttgatggta

SEQ ID NO: 80521 - DNA, 40 bp, Homo sapiens
taccatcaaggtttgattacatatatgtatgtgtatgtat

SEQ ID NO: 80522 - DNA, 40 bp, Homo sapiens
tacatacacatacatatatgtaatcaaaccttgatggtat

SEQ ID NO: 80523 - DNA, 40 bp, Homo sapiens
ataccatcaaggtttgattacatatatgtatgtgtatgta

SEQ ID NO: 80524 - DNA, 40 bp, Homo sapiens
acatacacatacatatatgtaatcaaaccttgatggtatt

SEQ ID NO: 80525 - DNA, 40 bp, Homo sapiens
aataccatcaaggtttgattacatatatgtatgtgtatgt

SEQ ID NO: 80526 - DNA, 40 bp, Homo sapiens
catacacatacatatatgtaatcaaaccttgatggtattg

SEQ ID NO: 80527 - DNA, 40 bp, Homo sapiens
caataccatcaaggtttgattacatatatgtatgtgtatg

SEQ ID NO: 80528 - DNA, 40 bp, Homo sapiens
atacacatacatatatgtaatcaaaccttgatggtattgt

SEQ ID NO: 80529 - DNA, 40 bp, Homo sapiens
acaataccatcaaggtttgattacatatatgtatgtgtat

SEQ ID NO: 80530 - DNA, 40 bp, Homo sapiens
tacacatacatatatgtaatcaaaccttgatggtattgta

SEQ ID NO: 80531 - DNA, 40 bp, Homo sapiens
tacaataccatcaaggtttgattacatatatgtatgtgta

SEQ ID NO: 80532 - DNA, 40 bp, Homo sapiens
acacatacatatatgtaatcaaaccttgatggtattgtat

SEQ ID NO: 80533 - DNA, 40 bp, Homo sapiens
atacaataccatcaaggtttgattacatatatgtatgtgt

SEQ ID NO: 80534 - DNA, 40 bp, Homo sapiens
cacatacatatatgtaatcaaaccttgatggtattgtatt

SEQ ID NO: 80535 - DNA, 40 bp, Homo sapiens
aatacaataccatcaaggtttgattacatatatgtatgtg

SEQ ID NO: 80536 - DNA, 40 bp, Homo sapiens
acatacatatatgtaatcaaaccttgatggtattgtattg

SEQ ID NO: 80537 - DNA, 40 bp, Homo sapiens
caatacaataccatcaaggtttgattacatatatgtatgt

SEQ ID NO: 80538 - DNA, 40 bp, Homo sapiens
catacatatatgtaatcaaaccttgatggtattgtattgc

SEQ ID NO: 80539 - DNA, 40 bp, Homo sapiens
gcaatacaataccatcaaggtttgattacatatatgtatg

SEQ ID NO: 80540 - DNA, 40 bp, Homo sapiens
atacatatatgtaatcaaaccttgatggtattgtattgct

SEQ ID NO: 80541 - DNA, 40 bp, Homo sapiens
agcaatacaataccatcaaggtttgattacatatatgtat

SEQ ID NO: 80542 - DNA, 40 bp, Homo sapiens
tacatatatgtaatcaaaccttgatggtattgtattgctg

SEQ ID NO: 80543 - DNA, 40 bp, Homo sapiens
cagcaatacaataccatcaaggtttgattacatatatgta

SEQ ID NO: 80544 - DNA, 40 bp, Homo sapiens
acatatatgtaatcaaaccttgatggtattgtattgctga

SEQ ID NO: 80545 - DNA, 40 bp, Homo sapiens
tcagcaatacaataccatcaaggtttgattacatatatgt

SEQ ID NO: 80546 - DNA, 40 bp, Homo sapiens
catatatgtaatcaaaccttgatggtattgtattgctgat

SEQ ID NO: 80547 - DNA, 40 bp, Homo sapiens
atcagcaatacaataccatcaaggtttgattacatatatg

SEQ ID NO: 80548 - DNA, 40 bp, Homo sapiens
atatatgtaatcaaaccttgatggtattgtattgctgata

SEQ ID NO: 80549 - DNA, 40 bp, Homo sapiens
tatcagcaatacaataccatcaaggtttgattacatatat

SEQ ID NO: 80550 - DNA, 40 bp, Homo sapiens
tatatgtaatcaaaccttgatggtattgtattgctgataa

SEQ ID NO: 80551 - DNA, 40 bp, Homo sapiens
ttatcagcaatacaataccatcaaggtttgattacatata

SEQ ID NO: 80552 - DNA, 40 bp, Homo sapiens
atatgtaatcaaaccttgatggtattgtattgctgataaa

SEQ ID NO: 80553 - DNA, 40 bp, Homo sapiens
tttatcagcaatacaataccatcaaggtttgattacatat

SEQ ID NO: 80554 - DNA, 40 bp, Homo sapiens
tatgtaatcaaaccttgatggtattgtattgctgataaat

SEQ ID NO: 80555 - DNA, 40 bp, Homo sapiens
atttatcagcaatacaataccatcaaggtttgattacata

SEQ ID NO: 80556 - DNA, 40 bp, Homo sapiens
atgtaatcaaaccttgatggtattgtattgctgataaatt

SEQ ID NO: 80557 - DNA, 40 bp, Homo sapiens
aatttatcagcaatacaataccatcaaggtttgattacat

SEQ ID NO: 80558 - DNA, 40 bp, Homo sapiens
tgtaatcaaaccttgatggtattgtattgctgataaatta

SEQ ID NO: 80559 - DNA, 40 bp, Homo sapiens
taatttatcagcaatacaataccatcaaggtttgattaca

SEQ ID NO: 80560 - DNA, 40 bp, Homo sapiens
gtaatcaaaccttgatggtattgtattgctgataaattat

SEQ ID NO: 80561 - DNA, 40 bp, Homo sapiens
ataatttatcagcaatacaataccatcaaggtttgattac

SEQ ID NO: 80562 - DNA, 40 bp, Homo sapiens
taatcaaaccttgatggtattgtattgctgataaattatt

SEQ ID NO: 80563 - DNA, 40 bp, Homo sapiens
aataatttatcagcaatacaataccatcaaggtttgatta

SEQ ID NO: 80564 - DNA, 40 bp, Homo sapiens
aatcaaaccttgatggtattgtattgctgataaattattt

SEQ ID NO: 80565 - DNA, 40 bp, Homo sapiens
aaataatttatcagcaatacaataccatcaaggtttgatt

SEQ ID NO: 80566 - DNA, 40 bp, Homo sapiens
atcaaaccttgatggtattgtattgctgataaattatttc

SEQ ID NO: 80567 - DNA, 40 bp, Homo sapiens
gaaataatttatcagcaatacaataccatcaaggtttgat

SEQ ID NO: 80568 - DNA, 40 bp, Homo sapiens
tcaaaccttgatggtattgtattgctgataaattatttct

SEQ ID NO: 80569 - DNA, 40 bp, Homo sapiens
agaaataatttatcagcaatacaataccatcaaggtttga

SEQ ID NO: 80570 - DNA, 40 bp, Homo sapiens
caaaccttgatggtattgtattgctgataaattatttctt

SEQ ID NO: 80571 - DNA, 40 bp, Homo sapiens
aagaaataatttatcagcaatacaataccatcaaggtttg

SEQ ID NO: 80572 - DNA, 40 bp, Homo sapiens
aaaccttgatggtattgtattgctgataaattatttctta

SEQ ID NO: 80573 - DNA, 40 bp, Homo sapiens
taagaaataatttatcagcaatacaataccatcaaggttt

SEQ ID NO: 80574 - DNA, 40 bp, Homo sapiens
aaccttgatggtattgtattgctgataaattatttcttac

SEQ ID NO: 80575 - DNA, 40 bp, Homo sapiens
gtaagaaataatttatcagcaatacaataccatcaaggtt

SEQ ID NO: 80576 - DNA, 40 bp, Homo sapiens
accttgatggtattgtattgctgataaattatttcttacc

SEQ ID NO: 80577 - DNA, 40 bp, Homo sapiens
ggtaagaaataatttatcagcaatacaataccatcaaggt

SEQ ID NO: 80578 - DNA, 40 bp, Homo sapiens
ccttgatggtattgtattgctgataaattatttcttacca

SEQ ID NO: 80579 - DNA, 40 bp, Homo sapiens
tggtaagaaataatttatcagcaatacaataccatcaagg

SEQ ID NO: 80580 - DNA, 40 bp, Homo sapiens
cttgatggtattgtattgctgataaattatttcttaccac

SEQ ID NO: 80581 - DNA, 40 bp, Homo sapiens
gtggtaagaaataatttatcagcaatacaataccatcaag

SEQ ID NO: 80582 - DNA, 40 bp, Homo sapiens
ttgatggtattgtattgctgataaattatttcttaccact

SEQ ID NO: 80583 - DNA, 40 bp, Homo sapiens
agtggtaagaaataatttatcagcaatacaataccatcaa

SEQ ID NO: 80584 - DNA, 40 bp, Homo sapiens
tgatggtattgtattgctgataaattatttcttaccactt

SEQ ID NO: 80585 - DNA, 40 bp, Homo sapiens
aagtggtaagaaataatttatcagcaatacaataccatca

SEQ ID NO: 80586 - DNA, 40 bp, Homo sapiens
gatggtattgtattgctgataaattatttcttaccacttt

SEQ ID NO: 80587 - DNA, 40 bp, Homo sapiens
aaagtggtaagaaataatttatcagcaatacaataccatc

SEQ ID NO: 80588 - DNA, 40 bp, Homo sapiens
atggtattgtattgctgataaattatttcttaccactttt

SEQ ID NO: 80589 - DNA, 40 bp, Homo sapiens
aaaagtggtaagaaataatttatcagcaatacaataccat

SEQ ID NO: 80590 - DNA, 40 bp, Homo sapiens
tggtattgtattgctgataaattatttcttaccacttttc

SEQ ID NO: 80591 - DNA, 40 bp, Homo sapiens
gaaaagtggtaagaaataatttatcagcaatacaatacca

SEQ ID NO: 80592 - DNA, 40 bp, Homo sapiens
ggtattgtattgctgataaattatttcttaccacttttcc

SEQ ID NO: 80593 - DNA, 40 bp, Homo sapiens
ggaaaagtggtaagaaataatttatcagcaatacaatacc

SEQ ID NO: 80594 - DNA, 40 bp, Homo sapiens
gtattgtattgctgataaattatttcttaccacttttcct

SEQ ID NO: 80595 - DNA, 40 bp, Homo sapiens
aggaaaagtggtaagaaataatttatcagcaatacaatac

SEQ ID NO: 80596 - DNA, 40 bp, Homo sapiens
tattgtattgctgataaattatttcttaccacttttcctt

SEQ ID NO: 80597 - DNA, 40 bp, Homo sapiens
aaggaaaagtggtaagaaataatttatcagcaatacaata

SEQ ID NO: 80598 - DNA, 40 bp, Homo sapiens
attgtattgctgataaattatttcttaccacttttccttt

SEQ ID NO: 80599 - DNA, 40 bp, Homo sapiens
aaaggaaaagtggtaagaaataatttatcagcaatacaat

SEQ ID NO: 80600 - DNA, 40 bp, Homo sapiens
ttgtattgctgataaattatttcttaccacttttcctttc

SEQ ID NO: 80601 - DNA, 40 bp, Homo sapiens
gaaaggaaaagtggtaagaaataatttatcagcaatacaa

SEQ ID NO: 80602 - DNA, 40 bp, Homo sapiens
tgtattgctgataaattatttcttaccacttttcctttct

SEQ ID NO: 80603 - DNA, 40 bp, Homo sapiens
agaaaggaaaagtggtaagaaataatttatcagcaataca

SEQ ID NO: 80604 - DNA, 40 bp, Homo sapiens
gtattgctgataaattatttcttaccacttttcctttctc

SEQ ID NO: 80605 - DNA, 40 bp, Homo sapiens
gagaaaggaaaagtggtaagaaataatttatcagcaatac

SEQ ID NO: 80606 - DNA, 40 bp, Homo sapiens
tattgctgataaattatttcttaccacttttcctttctcc

SEQ ID NO: 80607 - DNA, 40 bp, Homo sapiens
ggagaaaggaaaagtggtaagaaataatttatcagcaata

SEQ ID NO: 80608 - DNA, 40 bp, Homo sapiens
attgctgataaattatttcttaccacttttcctttctcct

SEQ ID NO: 80609 - DNA, 40 bp, Homo sapiens
aggagaaaggaaaagtggtaagaaataatttatcagcaat

SEQ ID NO: 80610 - DNA, 40 bp, Homo sapiens
ttgctgataaattatttcttaccacttttcctttctcctg

SEQ ID NO: 80611 - DNA, 40 bp, Homo sapiens
caggagaaaggaaaagtggtaagaaataatttatcagcaa

SEQ ID NO: 80612 - DNA, 40 bp, Homo sapiens
tgctgataaattatttcttaccacttttcctttctcctgt

SEQ ID NO: 80613 - DNA, 40 bp, Homo sapiens
acaggagaaaggaaaagtggtaagaaataatttatcagca

SEQ ID NO: 80614 - DNA, 40 bp, Homo sapiens
gctgataaattatttcttaccacttttcctttctcctgtg

SEQ ID NO: 80615 - DNA, 40 bp, Homo sapiens
cacaggagaaaggaaaagtggtaagaaataatttatcagc

SEQ ID NO: 80616 - DNA, 40 bp, Homo sapiens
ctgataaattatttcttaccacttttcctttctcctgtgg

SEQ ID NO: 80617 - DNA, 40 bp, Homo sapiens
ccacaggagaaaggaaaagtggtaagaaataatttatcag

SEQ ID NO: 80618 - DNA, 40 bp, Homo sapiens
tgataaattatttcttaccacttttcctttctcctgtggg

SEQ ID NO: 80619 - DNA, 40 bp, Homo sapiens
cccacaggagaaaggaaaagtggtaagaaataatttatca

SEQ ID NO: 80620 - DNA, 40 bp, Homo sapiens
gataaattatttcttaccacttttcctttctcctgtggga

SEQ ID NO: 80621 - DNA, 40 bp, Homo sapiens
tcccacaggagaaaggaaaagtggtaagaaataatttatc

SEQ ID NO: 80622 - DNA, 40 bp, Homo sapiens
ataaattatttcttaccacttttcctttctcctgtgggag

SEQ ID NO: 80623 - DNA, 40 bp, Homo sapiens
ctcccacaggagaaaggaaaagtggtaagaaataatttat

SEQ ID NO: 80624 - DNA, 40 bp, Homo sapiens
taaattatttcttaccacttttcctttctcctgtgggaga

SEQ ID NO: 80625 - DNA, 40 bp, Homo sapiens
tctcccacaggagaaaggaaaagtggtaagaaataattta

SEQ ID NO: 80626 - DNA, 40 bp, Homo sapiens
aaattatttcttaccacttttcctttctcctgtgggagaa

SEQ ID NO: 80627 - DNA, 40 bp, Homo sapiens
ttctcccacaggagaaaggaaaagtggtaagaaataattt

SEQ ID NO: 80628 - DNA, 40 bp, Homo sapiens
aattatttcttaccacttttcctttctcctgtgggagaaa

SEQ ID NO: 80629 - DNA, 40 bp, Homo sapiens
tttctcccacaggagaaaggaaaagtggtaagaaataatt

SEQ ID NO: 80630 - DNA, 40 bp, Homo sapiens
attatttcttaccacttttcctttctcctgtgggagaaac

SEQ ID NO: 80631 - DNA, 40 bp, Homo sapiens
gtttctcccacaggagaaaggaaaagtggtaagaaataat

SEQ ID NO: 80632 - DNA, 40 bp, Homo sapiens
ttatttcttaccacttttcctttctcctgtgggagaaaca

SEQ ID NO: 80633 - DNA, 40 bp, Homo sapiens
tgtttctcccacaggagaaaggaaaagtggtaagaaataa

SEQ ID NO: 80634 - DNA, 40 bp, Homo sapiens
tatttcttaccacttttcctttctcctgtgggagaaacaa

SEQ ID NO: 80635 - DNA, 40 bp, Homo sapiens
ttgtttctcccacaggagaaaggaaaagtggtaagaaata

SEQ ID NO: 80636 - DNA, 40 bp, Homo sapiens
atttcttaccacttttcctttctcctgtgggagaaacaaa

SEQ ID NO: 80637 - DNA, 40 bp, Homo sapiens
tttgtttctcccacaggagaaaggaaaagtggtaagaaat

SEQ ID NO: 80638 - DNA, 40 bp, Homo sapiens
tttcttaccacttttcctttctcctgtgggagaaacaaaa

SEQ ID NO: 80639 - DNA, 40 bp, Homo sapiens
ttttgtttctcccacaggagaaaggaaaagtggtaagaaa

SEQ ID NO: 80640 - DNA, 40 bp, Homo sapiens
ttcttaccacttttcctttctcctgtgggagaaacaaaag

SEQ ID NO: 80641 - DNA, 40 bp, Homo sapiens
cttttgtttctcccacaggagaaaggaaaagtggtaagaa

SEQ ID NO: 80642 - DNA, 40 bp, Homo sapiens
tcttaccacttttcctttctcctgtgggagaaacaaaagc

SEQ ID NO: 80643 - DNA, 40 bp, Homo sapiens
gcttttgtttctcccacaggagaaaggaaaagtggtaaga

SEQ ID NO: 80644 - DNA, 40 bp, Homo sapiens
cttaccacttttcctttctcctgtgggagaaacaaaagca

SEQ ID NO: 80645 - DNA, 40 bp, Homo sapiens
tgcttttgtttctcccacaggagaaaggaaaagtggtaag

SEQ ID NO: 80646 - DNA, 40 bp, Homo sapiens
ttaccacttttcctttctcctgtgggagaaacaaaagcat

SEQ ID NO: 80647 - DNA, 40 bp, Homo sapiens
atgcttttgtttctcccacaggagaaaggaaaagtggtaa

SEQ ID NO: 80648 - DNA, 40 bp, Homo sapiens
taccacttttcctttctcctgtgggagaaacaaaagcata

SEQ ID NO: 80649 - DNA, 40 bp, Homo sapiens
tatgcttttgtttctcccacaggagaaaggaaaagtggta

SEQ ID NO: 80650 - DNA, 40 bp, Homo sapiens
accacttttcctttctcctgtgggagaaacaaaagcatat

SEQ ID NO: 80651 - DNA, 40 bp, Homo sapiens
atatgcttttgtttctcccacaggagaaaggaaaagtggt

SEQ ID NO: 80652 - DNA, 40 bp, Homo sapiens
ccacttttcctttctcctgtgggagaaacaaaagcatatg

SEQ ID NO: 80653 - DNA, 40 bp, Homo sapiens
catatgcttttgtttctcccacaggagaaaggaaaagtgg

SEQ ID NO: 80654 - DNA, 40 bp, Homo sapiens
cacttttcctttctcctgtgggagaaacaaaagcatatgt

SEQ ID NO: 80655 - DNA, 40 bp, Homo sapiens
acatatgcttttgtttctcccacaggagaaaggaaaagtg

SEQ ID NO: 80656 - DNA, 40 bp, Homo sapiens
acttttcctttctcctgtgggagaaacaaaagcatatgtt

SEQ ID NO: 80657 - DNA, 40 bp, Homo sapiens
aacatatgcttttgtttctcccacaggagaaaggaaaagt

SEQ ID NO: 80658 - DNA, 40 bp, Homo sapiens
cttttcctttctcctgtgggagaaacaaaagcatatgttt

SEQ ID NO: 80659 - DNA, 40 bp, Homo sapiens
aaacatatgcttttgtttctcccacaggagaaaggaaaag

SEQ ID NO: 80660 - DNA, 40 bp, Homo sapiens
ttttcctttctcctgtgggagaaacaaaagcatatgtttg

SEQ ID NO: 80661 - DNA, 40 bp, Homo sapiens
caaacatatgcttttgtttctcccacaggagaaaggaaaa

SEQ ID NO: 80662 - DNA, 40 bp, Homo sapiens
tttcctttctcctgtgggagaaacaaaagcatatgtttgt

SEQ ID NO: 80663 - DNA, 40 bp, Homo sapiens
acaaacatatgcttttgtttctcccacaggagaaaggaaa

SEQ ID NO: 80664 - DNA, 40 bp, Homo sapiens
ttcctttctcctgtgggagaaacaaaagcatatgtttgtg

SEQ ID NO: 80665 - DNA, 40 bp, Homo sapiens
cacaaacatatgcttttgtttctcccacaggagaaaggaa

SEQ ID NO: 80666 - DNA, 40 bp, Homo sapiens
tcctttctcctgtgggagaaacaaaagcatatgtttgtgt

SEQ ID NO: 80667 - DNA, 40 bp, Homo sapiens
acacaaacatatgcttttgtttctcccacaggagaaagga

SEQ ID NO: 80668 - DNA, 40 bp, Homo sapiens
cctttctcctgtgggagaaacaaaagcatatgtttgtgta

SEQ ID NO: 80669 - DNA, 40 bp, Homo sapiens
tacacaaacatatgcttttgtttctcccacaggagaaagg

SEQ ID NO: 80670 - DNA, 40 bp, Homo sapiens
ctttctcctgtgggagaaacaaaagcatatgtttgtgtag

SEQ ID NO: 80671 - DNA, 40 bp, Homo sapiens
ctacacaaacatatgcttttgtttctcccacaggagaaag

SEQ ID NO: 80672 - DNA, 40 bp, Homo sapiens
tttctcctgtgggagaaacaaaagcatatgtttgtgtagt

SEQ ID NO: 80673 - DNA, 40 bp, Homo sapiens
actacacaaacatatgcttttgtttctcccacaggagaaa

SEQ ID NO: 80674 - DNA, 40 bp, Homo sapiens
ttctcctgtgggagaaacaaaagcatatgtttgtgtagta

SEQ ID NO: 80675 - DNA, 40 bp, Homo sapiens
tactacacaaacatatgcttttgtttctcccacaggagaa

SEQ ID NO: 80676 - DNA, 40 bp, Homo sapiens
tctcctgtgggagaaacaaaagcatatgtttgtgtagtat

SEQ ID NO: 80677 - DNA, 40 bp, Homo sapiens
atactacacaaacatatgcttttgtttctcccacaggaga

SEQ ID NO: 80678 - DNA, 40 bp, Homo sapiens
ctcctgtgggagaaacaaaagcatatgtttgtgtagtatc

SEQ ID NO: 80679 - DNA, 40 bp, Homo sapiens
gatactacacaaacatatgcttttgtttctcccacaggag

SEQ ID NO: 80680 - DNA, 40 bp, Homo sapiens
tcctgtgggagaaacaaaagcatatgtttgtgtagtatca

SEQ ID NO: 80681 - DNA, 40 bp, Homo sapiens
tgatactacacaaacatatgcttttgtttctcccacagga

SEQ ID NO: 80682 - DNA, 40 bp, Homo sapiens
cctgtgggagaaacaaaagcatatgtttgtgtagtatcag

SEQ ID NO: 80683 - DNA, 40 bp, Homo sapiens
ctgatactacacaaacatatgcttttgtttctcccacagg

SEQ ID NO: 80684 - DNA, 40 bp, Homo sapiens
ctgtgggagaaacaaaagcatatgtttgtgtagtatcagt

SEQ ID NO: 80685 - DNA, 40 bp, Homo sapiens
actgatactacacaaacatatgcttttgtttctcccacag

SEQ ID NO: 80686 - DNA, 40 bp, Homo sapiens
tgtgggagaaacaaaagcatatgtttgtgtagtatcagta

SEQ ID NO: 80687 - DNA, 40 bp, Homo sapiens
tactgatactacacaaacatatgcttttgtttctcccaca

SEQ ID NO: 80688 - DNA, 40 bp, Homo sapiens
gtgggagaaacaaaagcatatgtttgtgtagtatcagtaa

SEQ ID NO: 80689 - DNA, 40 bp, Homo sapiens
ttactgatactacacaaacatatgcttttgtttctcccac

SEQ ID NO: 80690 - DNA, 40 bp, Homo sapiens
tgggagaaacaaaagcatatgtttgtgtagtatcagtaat

SEQ ID NO: 80691 - DNA, 40 bp, Homo sapiens
attactgatactacacaaacatatgcttttgtttctccca

SEQ ID NO: 80692 - DNA, 40 bp, Homo sapiens
gggagaaacaaaagcatatgtttgtgtagtatcagtaatg

SEQ ID NO: 80693 - DNA, 40 bp, Homo sapiens
cattactgatactacacaaacatatgcttttgtttctccc

SEQ ID NO: 80694 - DNA, 40 bp, Homo sapiens
ggagaaacaaaagcatatgtttgtgtagtatcagtaatga

SEQ ID NO: 80695 - DNA, 40 bp, Homo sapiens
tcattactgatactacacaaacatatgcttttgtttctcc

SEQ ID NO: 80696 - DNA, 40 bp, Homo sapiens
gagaaacaaaagcatatgtttgtgtagtatcagtaatgat

SEQ ID NO: 80697 - DNA, 40 bp, Homo sapiens
atcattactgatactacacaaacatatgcttttgtttctc

SEQ ID NO: 80698 - DNA, 40 bp, Homo sapiens
agaaacaaaagcatatgtttgtgtagtatcagtaatgata

SEQ ID NO: 80699 - DNA, 40 bp, Homo sapiens
tatcattactgatactacacaaacatatgcttttgtttct

SEQ ID NO: 80700 - DNA, 40 bp, Homo sapiens
gaaacaaaagcatatgtttgtgtagtatcagtaatgatat

SEQ ID NO: 80701 - DNA, 40 bp, Homo sapiens
atatcattactgatactacacaaacatatgcttttgtttc

SEQ ID NO: 80702 - DNA, 40 bp, Homo sapiens
aaacaaaagcatatgtttgtgtagtatcagtaatgatatt

SEQ ID NO: 80703 - DNA, 40 bp, Homo sapiens
aatatcattactgatactacacaaacatatgcttttgttt

SEQ ID NO: 80704 - DNA, 40 bp, Homo sapiens
aacaaaagcatatgtttgtgtagtatcagtaatgatatta

SEQ ID NO: 80705 - DNA, 40 bp, Homo sapiens
taatatcattactgatactacacaaacatatgcttttgtt

SEQ ID NO: 80706 - DNA, 40 bp, Homo sapiens
acaaaagcatatgtttgtgtagtatcagtaatgatattag

SEQ ID NO: 80707 - DNA, 40 bp, Homo sapiens
ctaatatcattactgatactacacaaacatatgcttttgt

SEQ ID NO: 80708 - DNA, 40 bp, Homo sapiens
caaaagcatatgtttgtgtagtatcagtaatgatattaga

SEQ ID NO: 80709 - DNA, 40 bp, Homo sapiens
tctaatatcattactgatactacacaaacatatgcttttg

SEQ ID NO: 80710 - DNA, 40 bp, Homo sapiens
aaaagcatatgtttgtgtagtatcagtaatgatattagag

SEQ ID NO: 80711 - DNA, 40 bp, Homo sapiens
ctctaatatcattactgatactacacaaacatatgctttt

SEQ ID NO: 80712 - DNA, 40 bp, Homo sapiens
aaagcatatgtttgtgtagtatcagtaatgatattagaga

SEQ ID NO: 80713 - DNA, 40 bp, Homo sapiens
tctctaatatcattactgatactacacaaacatatgcttt

SEQ ID NO: 80714 - DNA, 40 bp, Homo sapiens
aagcatatgtttgtgtagtatcagtaatgatattagagag

SEQ ID NO: 80715 - DNA, 40 bp, Homo sapiens
ctctctaatatcattactgatactacacaaacatatgctt

SEQ ID NO: 80716 - DNA, 40 bp, Homo sapiens
agcatatgtttgtgtagtatcagtaatgatattagagagt

SEQ ID NO: 80717 - DNA, 40 bp, Homo sapiens
actctctaatatcattactgatactacacaaacatatgct

SEQ ID NO: 80718 - DNA, 40 bp, Homo sapiens
gcatatgtttgtgtagtatcagtaatgatattagagagtg

SEQ ID NO: 80719 - DNA, 40 bp, Homo sapiens
cactctctaatatcattactgatactacacaaacatatgc

SEQ ID NO: 80720 - DNA, 40 bp, Homo sapiens
catatgtttgtgtagtatcagtaatgatattagagagtgg

SEQ ID NO: 80721 - DNA, 40 bp, Homo sapiens
ccactctctaatatcattactgatactacacaaacatatg

SEQ ID NO: 80722 - DNA, 40 bp, Homo sapiens
atatgtttgtgtagtatcagtaatgatattagagagtggg

SEQ ID NO: 80723 - DNA, 40 bp, Homo sapiens
cccactctctaatatcattactgatactacacaaacatat

SEQ ID NO: 80724 - DNA, 40 bp, Homo sapiens
tatgtttgtgtagtatcagtaatgatattagagagtggga

SEQ ID NO: 80725 - DNA, 40 bp, Homo sapiens
tcccactctctaatatcattactgatactacacaaacata

SEQ ID NO: 80726 - DNA, 40 bp, Homo sapiens
atgtttgtgtagtatcagtaatgatattagagagtgggaa

SEQ ID NO: 80727 - DNA, 40 bp, Homo sapiens
ttcccactctctaatatcattactgatactacacaaacat

SEQ ID NO: 80728 - DNA, 40 bp, Homo sapiens
tgtttgtgtagtatcagtaatgatattagagagtgggaaa

SEQ ID NO: 80729 - DNA, 40 bp, Homo sapiens
tttcccactctctaatatcattactgatactacacaaaca

SEQ ID NO: 80730 - DNA, 40 bp, Homo sapiens
gtttgtgtagtatcagtaatgatattagagagtgggaaac

SEQ ID NO: 80731 - DNA, 40 bp, Homo sapiens
gtttcccactctctaatatcattactgatactacacaaac

SEQ ID NO: 80732 - DNA, 40 bp, Homo sapiens
tttgtgtagtatcagtaatgatattagagagtgggaaaca

SEQ ID NO: 80733 - DNA, 40 bp, Homo sapiens
tgtttcccactctctaatatcattactgatactacacaaa

SEQ ID NO: 80734 - DNA, 40 bp, Homo sapiens
ttgtgtagtatcagtaatgatattagagagtgggaaacat

SEQ ID NO: 80735 - DNA, 40 bp, Homo sapiens
atgtttcccactctctaatatcattactgatactacacaa

SEQ ID NO: 80736 - DNA, 40 bp, Homo sapiens
tgtgtagtatcagtaatgatattagagagtgggaaacatc

SEQ ID NO: 80737 - DNA, 40 bp, Homo sapiens
gatgtttcccactctctaatatcattactgatactacaca

SEQ ID NO: 80738 - DNA, 40 bp, Homo sapiens
gtgtagtatcagtaatgatattagagagtgggaaacatca

SEQ ID NO: 80739 - DNA, 40 bp, Homo sapiens
tgatgtttcccactctctaatatcattactgatactacac

SEQ ID NO: 80740 - DNA, 40 bp, Homo sapiens
tgtagtatcagtaatgatattagagagtgggaaacatcag

SEQ ID NO: 80741 - DNA, 40 bp, Homo sapiens
ctgatgtttcccactctctaatatcattactgatactaca

SEQ ID NO: 80742 - DNA, 40 bp, Homo sapiens
gtagtatcagtaatgatattagagagtgggaaacatcagt

SEQ ID NO: 80743 - DNA, 40 bp, Homo sapiens
actgatgtttcccactctctaatatcattactgatactac

SEQ ID NO: 80744 - DNA, 40 bp, Homo sapiens
tagtatcagtaatgatattagagagtgggaaacatcagtg

SEQ ID NO: 80745 - DNA, 40 bp, Homo sapiens
cactgatgtttcccactctctaatatcattactgatacta

SEQ ID NO: 80746 - DNA, 40 bp, Homo sapiens
agtatcagtaatgatattagagagtgggaaacatcagtga

SEQ ID NO: 80747 - DNA, 40 bp, Homo sapiens
tcactgatgtttcccactctctaatatcattactgatact

SEQ ID NO: 80748 - DNA, 40 bp, Homo sapiens
gtatcagtaatgatattagagagtgggaaacatcagtgag

SEQ ID NO: 80749 - DNA, 40 bp, Homo sapiens
ctcactgatgtttcccactctctaatatcattactgatac

SEQ ID NO: 80750 - DNA, 40 bp, Homo sapiens
tatcagtaatgatattagagagtgggaaacatcagtgagt

SEQ ID NO: 80751 - DNA, 40 bp, Homo sapiens
actcactgatgtttcccactctctaatatcattactgata

SEQ ID NO: 80752 - DNA, 40 bp, Homo sapiens
atcagtaatgatattagagagtgggaaacatcagtgagtg

SEQ ID NO: 80753 - DNA, 40 bp, Homo sapiens
cactcactgatgtttcccactctctaatatcattactgat

SEQ ID NO: 80754 - DNA, 40 bp, Homo sapiens
tcagtaatgatattagagagtgggaaacatcagtgagtgc

SEQ ID NO: 80755 - DNA, 40 bp, Homo sapiens
gcactcactgatgtttcccactctctaatatcattactga

SEQ ID NO: 80756 - DNA, 40 bp, Homo sapiens
cagtaatgatattagagagtgggaaacatcagtgagtgca

SEQ ID NO: 80757 - DNA, 40 bp, Homo sapiens
tgcactcactgatgtttcccactctctaatatcattactg

SEQ ID NO: 80758 - DNA, 40 bp, Homo sapiens
agtaatgatattagagagtgggaaacatcagtgagtgcag

SEQ ID NO: 80759 - DNA, 40 bp, Homo sapiens
ctgcactcactgatgtttcccactctctaatatcattact

SEQ ID NO: 80760 - DNA, 40 bp, Homo sapiens
gtaatgatattagagagtgggaaacatcagtgagtgcagt

SEQ ID NO: 80761 - DNA, 40 bp, Homo sapiens
actgcactcactgatgtttcccactctctaatatcattac

SEQ ID NO: 80762 - DNA, 40 bp, Homo sapiens
taatgatattagagagtgggaaacatcagtgagtgcagtt

SEQ ID NO: 80763 - DNA, 40 bp, Homo sapiens
aactgcactcactgatgtttcccactctctaatatcatta

SEQ ID NO: 80764 - DNA, 40 bp, Homo sapiens
aatgatattagagagtgggaaacatcagtgagtgcagttt

SEQ ID NO: 80765 - DNA, 40 bp, Homo sapiens
aaactgcactcactgatgtttcccactctctaatatcatt

SEQ ID NO: 80766 - DNA, 40 bp, Homo sapiens
atgatattagagagtgggaaacatcagtgagtgcagtttg

SEQ ID NO: 80767 - DNA, 40 bp, Homo sapiens
caaactgcactcactgatgtttcccactctctaatatcat

SEQ ID NO: 80768 - DNA, 40 bp, Homo sapiens
tgatattagagagtgggaaacatcagtgagtgcagtttgg

SEQ ID NO: 80769 - DNA, 40 bp, Homo sapiens
ccaaactgcactcactgatgtttcccactctctaatatca

SEQ ID NO: 80770 - DNA, 40 bp, Homo sapiens
gatattagagagtgggaaacatcagtgagtgcagtttggg

SEQ ID NO: 80771 - DNA, 40 bp, Homo sapiens
cccaaactgcactcactgatgtttcccactctctaatatc

SEQ ID NO: 80772 - DNA, 40 bp, Homo sapiens
atattagagagtgggaaacatcagtgagtgcagtttgggg

SEQ ID NO: 80773 - DNA, 40 bp, Homo sapiens
ccccaaactgcactcactgatgtttcccactctctaatat

SEQ ID NO: 80774 - DNA, 40 bp, Homo sapiens
tattagagagtgggaaacatcagtgagtgcagtttgggga

SEQ ID NO: 80775 - DNA, 40 bp, Homo sapiens
tccccaaactgcactcactgatgtttcccactctctaata

SEQ ID NO: 80776 - DNA, 40 bp, Homo sapiens
attagagagtgggaaacatcagtgagtgcagtttggggac

SEQ ID NO: 80777 - DNA, 40 bp, Homo sapiens
gtccccaaactgcactcactgatgtttcccactctctaat

SEQ ID NO: 80778 - DNA, 40 bp, Homo sapiens
ttagagagtgggaaacatcagtgagtgcagtttggggact

SEQ ID NO: 80779 - DNA, 40 bp, Homo sapiens
agtccccaaactgcactcactgatgtttcccactctctaa

SEQ ID NO: 80780 - DNA, 40 bp, Homo sapiens
tagagagtgggaaacatcagtgagtgcagtttggggactt

SEQ ID NO: 80781 - DNA, 40 bp, Homo sapiens
aagtccccaaactgcactcactgatgtttcccactctcta

SEQ ID NO: 80782 - DNA, 40 bp, Homo sapiens
agagagtgggaaacatcagtgagtgcagtttggggacttt

SEQ ID NO: 80783 - DNA, 40 bp, Homo sapiens
aaagtccccaaactgcactcactgatgtttcccactctct

SEQ ID NO: 80784 - DNA, 40 bp, Homo sapiens
gagagtgggaaacatcagtgagtgcagtttggggacttta

SEQ ID NO: 80785 - DNA, 40 bp, Homo sapiens
taaagtccccaaactgcactcactgatgtttcccactctc

SEQ ID NO: 80786 - DNA, 40 bp, Homo sapiens
agagtgggaaacatcagtgagtgcagtttggggactttat

SEQ ID NO: 80787 - DNA, 40 bp, Homo sapiens
ataaagtccccaaactgcactcactgatgtttcccactct

SEQ ID NO: 80788 - DNA, 40 bp, Homo sapiens
gagtgggaaacatcagtgagtgcagtttggggactttatt

SEQ ID NO: 80789 - DNA, 40 bp, Homo sapiens
aataaagtccccaaactgcactcactgatgtttcccactc

SEQ ID NO: 80790 - DNA, 40 bp, Homo sapiens
agtgggaaacatcagtgagtgcagtttggggactttattg

SEQ ID NO: 80791 - DNA, 40 bp, Homo sapiens
caataaagtccccaaactgcactcactgatgtttcccact

SEQ ID NO: 80792 - DNA, 40 bp, Homo sapiens
gtgggaaacatcagtgagtgcagtttggggactttattgg

SEQ ID NO: 80793 - DNA, 40 bp, Homo sapiens
ccaataaagtccccaaactgcactcactgatgtttcccac

SEQ ID NO: 80794 - DNA, 40 bp, Homo sapiens
tgggaaacatcagtgagtgcagtttggggactttattgga

SEQ ID NO: 80795 - DNA, 40 bp, Homo sapiens
tccaataaagtccccaaactgcactcactgatgtttccca

SEQ ID NO: 80796 - DNA, 40 bp, Homo sapiens
gggaaacatcagtgagtgcagtttggggactttattggag

SEQ ID NO: 80797 - DNA, 40 bp, Homo sapiens
ctccaataaagtccccaaactgcactcactgatgtttccc

SEQ ID NO: 80798 - DNA, 40 bp, Homo sapiens
ggaaacatcagtgagtgcagtttggggactttattggaga

SEQ ID NO: 80799 - DNA, 40 bp, Homo sapiens
tctccaataaagtccccaaactgcactcactgatgtttcc

SEQ ID NO: 80800 - DNA, 40 bp, Homo sapiens
gaaacatcagtgagtgcagtttggggactttattggagac

SEQ ID NO: 80801 - DNA, 40 bp, Homo sapiens
gtctccaataaagtccccaaactgcactcactgatgtttc

SEQ ID NO: 80802 - DNA, 40 bp, Homo sapiens
aaacatcagtgagtgcagtttggggactttattggagact

SEQ ID NO: 80803 - DNA, 40 bp, Homo sapiens
agtctccaataaagtccccaaactgcactcactgatgttt

SEQ ID NO: 80804 - DNA, 40 bp, Homo sapiens
aacatcagtgagtgcagtttggggactttattggagactt

SEQ ID NO: 80805 - DNA, 40 bp, Homo sapiens
aagtctccaataaagtccccaaactgcactcactgatgtt

SEQ ID NO: 80806 - DNA, 40 bp, Homo sapiens
acatcagtgagtgcagtttggggactttattggagacttt

SEQ ID NO: 80807 - DNA, 40 bp, Homo sapiens
aaagtctccaataaagtccccaaactgcactcactgatgt

SEQ ID NO: 80808 - DNA, 40 bp, Homo sapiens
catcagtgagtgcagtttggggactttattggagactttc

SEQ ID NO: 80809 - DNA, 40 bp, Homo sapiens
gaaagtctccaataaagtccccaaactgcactcactgatg

SEQ ID NO: 80810 - DNA, 40 bp, Homo sapiens
atcagtgagtgcagtttggggactttattggagactttca

SEQ ID NO: 80811 - DNA, 40 bp, Homo sapiens
tgaaagtctccaataaagtccccaaactgcactcactgat

SEQ ID NO: 80812 - DNA, 40 bp, Homo sapiens
tcagtgagtgcagtttggggactttattggagactttcac

SEQ ID NO: 80813 - DNA, 40 bp, Homo sapiens
gtgaaagtctccaataaagtccccaaactgcactcactga

SEQ ID NO: 80814 - DNA, 40 bp, Homo sapiens
cagtgagtgcagtttggggactttattggagactttcact

SEQ ID NO: 80815 - DNA, 40 bp, Homo sapiens
agtgaaagtctccaataaagtccccaaactgcactcactg

SEQ ID NO: 80816 - DNA, 40 bp, Homo sapiens
agtgagtgcagtttggggactttattggagactttcacta

SEQ ID NO: 80817 - DNA, 40 bp, Homo sapiens
tagtgaaagtctccaataaagtccccaaactgcactcact

SEQ ID NO: 80818 - DNA, 40 bp, Homo sapiens
gtgagtgcagtttggggactttattggagactttcactag

SEQ ID NO: 80819 - DNA, 40 bp, Homo sapiens
ctagtgaaagtctccaataaagtccccaaactgcactcac

SEQ ID NO: 80820 - DNA, 40 bp, Homo sapiens
tgagtgcagtttggggactttattggagactttcactagt

SEQ ID NO: 80821 - DNA, 40 bp, Homo sapiens
actagtgaaagtctccaataaagtccccaaactgcactca

SEQ ID NO: 80822 - DNA, 40 bp, Homo sapiens
gagtgcagtttggggactttattggagactttcactagtg

SEQ ID NO: 80823 - DNA, 40 bp, Homo sapiens
cactagtgaaagtctccaataaagtccccaaactgcactc

SEQ ID NO: 80824 - DNA, 40 bp, Homo sapiens
agtgcagtttggggactttattggagactttcactagtgc

SEQ ID NO: 80825 - DNA, 40 bp, Homo sapiens
gcactagtgaaagtctccaataaagtccccaaactgcact

SEQ ID NO: 80826 - DNA, 40 bp, Homo sapiens
gtgcagtttggggactttattggagactttcactagtgct

SEQ ID NO: 80827 - DNA, 40 bp, Homo sapiens
agcactagtgaaagtctccaataaagtccccaaactgcac

SEQ ID NO: 80828 - DNA, 40 bp, Homo sapiens
tgcagtttggggactttattggagactttcactagtgctc

SEQ ID NO: 80829 - DNA, 40 bp, Homo sapiens
gagcactagtgaaagtctccaataaagtccccaaactgca

SEQ ID NO: 80830 - DNA, 40 bp, Homo sapiens
gcagtttggggactttattggagactttcactagtgctca

SEQ ID NO: 80831 - DNA, 40 bp, Homo sapiens
tgagcactagtgaaagtctccaataaagtccccaaactgc

SEQ ID NO: 80832 - DNA, 40 bp, Homo sapiens
cagtttggggactttattggagactttcactagtgctcaa

SEQ ID NO: 80833 - DNA, 40 bp, Homo sapiens
ttgagcactagtgaaagtctccaataaagtccccaaactg

SEQ ID NO: 80834 - DNA, 40 bp, Homo sapiens
agtttggggactttattggagactttcactagtgctcaaa

SEQ ID NO: 80835 - DNA, 40 bp, Homo sapiens
tttgagcactagtgaaagtctccaataaagtccccaaact

SEQ ID NO: 80836 - DNA, 40 bp, Homo sapiens
gtttggggactttattggagactttcactagtgctcaaat

SEQ ID NO: 80837 - DNA, 40 bp, Homo sapiens
atttgagcactagtgaaagtctccaataaagtccccaaac

SEQ ID NO: 80838 - DNA, 40 bp, Homo sapiens
tttggggactttattggagactttcactagtgctcaaata

SEQ ID NO: 80839 - DNA, 40 bp, Homo sapiens
tatttgagcactagtgaaagtctccaataaagtccccaaa

SEQ ID NO: 80840 - DNA, 40 bp, Homo sapiens
ttggggactttattggagactttcactagtgctcaaataa

SEQ ID NO: 80841 - DNA, 40 bp, Homo sapiens
ttatttgagcactagtgaaagtctccaataaagtccccaa

SEQ ID NO: 80842 - DNA, 40 bp, Homo sapiens
tggggactttattggagactttcactagtgctcaaataaa

SEQ ID NO: 80843 - DNA, 40 bp, Homo sapiens
tttatttgagcactagtgaaagtctccaataaagtcccca

SEQ ID NO: 80844 - DNA, 40 bp, Homo sapiens
ggggactttattggagactttcactagtgctcaaataaat

SEQ ID NO: 80845 - DNA, 40 bp, Homo sapiens
atttatttgagcactagtgaaagtctccaataaagtcccc

SEQ ID NO: 80846 - DNA, 40 bp, Homo sapiens
gggactttattggagactttcactagtgctcaaataaata

SEQ ID NO: 80847 - DNA, 40 bp, Homo sapiens
tatttatttgagcactagtgaaagtctccaataaagtccc

SEQ ID NO: 80848 - DNA, 40 bp, Homo sapiens
ggactttattggagactttcactagtgctcaaataaataa

SEQ ID NO: 80849 - DNA, 40 bp, Homo sapiens
ttatttatttgagcactagtgaaagtctccaataaagtcc

SEQ ID NO: 80850 - DNA, 40 bp, Homo sapiens
gactttattggagactttcactagtgctcaaataaataat

SEQ ID NO: 80851 - DNA, 40 bp, Homo sapiens
attatttatttgagcactagtgaaagtctccaataaagtc

SEQ ID NO: 80852 - DNA, 40 bp, Homo sapiens
actttattggagactttcactagtgctcaaataaataatg

SEQ ID NO: 80853 - DNA, 40 bp, Homo sapiens
cattatttatttgagcactagtgaaagtctccaataaagt

SEQ ID NO: 80854 - DNA, 40 bp, Homo sapiens
ctttattggagactttcactagtgctcaaataaataatgc

SEQ ID NO: 80855 - DNA, 40 bp, Homo sapiens
gcattatttatttgagcactagtgaaagtctccaataaag

SEQ ID NO: 80856 - DNA, 40 bp, Homo sapiens
tttattggagactttcactagtgctcaaataaataatgct

SEQ ID NO: 80857 - DNA, 40 bp, Homo sapiens
agcattatttatttgagcactagtgaaagtctccaataaa

SEQ ID NO: 80858 - DNA, 40 bp, Homo sapiens
ttattggagactttcactagtgctcaaataaataatgctg

SEQ ID NO: 80859 - DNA, 40 bp, Homo sapiens
cagcattatttatttgagcactagtgaaagtctccaataa

SEQ ID NO: 80860 - DNA, 40 bp, Homo sapiens
tattggagactttcactagtgctcaaataaataatgctgg

SEQ ID NO: 80861 - DNA, 40 bp, Homo sapiens
ccagcattatttatttgagcactagtgaaagtctccaata

SEQ ID NO: 80862 - DNA, 40 bp, Homo sapiens
attggagactttcactagtgctcaaataaataatgctggt

SEQ ID NO: 80863 - DNA, 40 bp, Homo sapiens
accagcattatttatttgagcactagtgaaagtctccaat

SEQ ID NO: 80864 - DNA, 40 bp, Homo sapiens
ttggagactttcactagtgctcaaataaataatgctggtt

SEQ ID NO: 80865 - DNA, 40 bp, Homo sapiens
aaccagcattatttatttgagcactagtgaaagtctccaa

SEQ ID NO: 80866 - DNA, 40 bp, Homo sapiens
tggagactttcactagtgctcaaataaataatgctggttt

SEQ ID NO: 80867 - DNA, 40 bp, Homo sapiens
aaaccagcattatttatttgagcactagtgaaagtctcca

SEQ ID NO: 80868 - DNA, 40 bp, Homo sapiens
ggagactttcactagtgctcaaataaataatgctggtttt

SEQ ID NO: 80869 - DNA, 40 bp, Homo sapiens
aaaaccagcattatttatttgagcactagtgaaagtctcc

SEQ ID NO: 80870 - DNA, 40 bp, Homo sapiens
gagactttcactagtgctcaaataaataatgctggttttt

SEQ ID NO: 80871 - DNA, 40 bp, Homo sapiens
aaaaaccagcattatttatttgagcactagtgaaagtctc

SEQ ID NO: 80872 - DNA, 40 bp, Homo sapiens
agactttcactagtgctcaaataaataatgctggttttta

SEQ ID NO: 80873 - DNA, 40 bp, Homo sapiens
taaaaaccagcattatttatttgagcactagtgaaagtct

SEQ ID NO: 80874 - DNA, 40 bp, Homo sapiens
gactttcactagtgctcaaataaataatgctggtttttat

SEQ ID NO: 80875 - DNA, 40 bp, Homo sapiens
ataaaaaccagcattatttatttgagcactagtgaaagtc

SEQ ID NO: 80876 - DNA, 40 bp, Homo sapiens
actttcactagtgctcaaataaataatgctggtttttatc

SEQ ID NO: 80877 - DNA, 40 bp, Homo sapiens
gataaaaaccagcattatttatttgagcactagtgaaagt

SEQ ID NO: 80878 - DNA, 40 bp, Homo sapiens
ctttcactagtgctcaaataaataatgctggtttttatcc

SEQ ID NO: 80879 - DNA, 40 bp, Homo sapiens
ggataaaaaccagcattatttatttgagcactagtgaaag

SEQ ID NO: 80880 - DNA, 40 bp, Homo sapiens
tttcactagtgctcaaataaataatgctggtttttatcct

SEQ ID NO: 80881 - DNA, 40 bp, Homo sapiens
aggataaaaaccagcattatttatttgagcactagtgaaa

SEQ ID NO: 80882 - DNA, 40 bp, Homo sapiens
ttcactagtgctcaaataaataatgctggtttttatccta

SEQ ID NO: 80883 - DNA, 40 bp, Homo sapiens
taggataaaaaccagcattatttatttgagcactagtgaa

SEQ ID NO: 80884 - DNA, 40 bp, Homo sapiens
tcactagtgctcaaataaataatgctggtttttatcctac

SEQ ID NO: 80885 - DNA, 40 bp, Homo sapiens
gtaggataaaaaccagcattatttatttgagcactagtga

SEQ ID NO: 80886 - DNA, 40 bp, Homo sapiens
cactagtgctcaaataaataatgctggtttttatcctact

SEQ ID NO: 80887 - DNA, 40 bp, Homo sapiens
agtaggataaaaaccagcattatttatttgagcactagtg

SEQ ID NO: 80888 - DNA, 40 bp, Homo sapiens
actagtgctcaaataaataatgctggtttttatcctactg

SEQ ID NO: 80889 - DNA, 40 bp, Homo sapiens
cagtaggataaaaaccagcattatttatttgagcactagt

SEQ ID NO: 80890 - DNA, 40 bp, Homo sapiens
ctagtgctcaaataaataatgctggtttttatcctactgt

SEQ ID NO: 80891 - DNA, 40 bp, Homo sapiens
acagtaggataaaaaccagcattatttatttgagcactag

SEQ ID NO: 80892 - DNA, 40 bp, Homo sapiens
tagtgctcaaataaataatgctggtttttatcctactgtt

SEQ ID NO: 80893 - DNA, 40 bp, Homo sapiens
aacagtaggataaaaaccagcattatttatttgagcacta

SEQ ID NO: 80894 - DNA, 40 bp, Homo sapiens
agtgctcaaataaataatgctggtttttatcctactgttt

SEQ ID NO: 80895 - DNA, 40 bp, Homo sapiens
aaacagtaggataaaaaccagcattatttatttgagcact

SEQ ID NO: 80896 - DNA, 40 bp, Homo sapiens
gtgctcaaataaataatgctggtttttatcctactgtttg

SEQ ID NO: 80897 - DNA, 40 bp, Homo sapiens
caaacagtaggataaaaaccagcattatttatttgagcac

SEQ ID NO: 80898 - DNA, 40 bp, Homo sapiens
tgctcaaataaataatgctggtttttatcctactgtttgc

SEQ ID NO: 80899 - DNA, 40 bp, Homo sapiens
gcaaacagtaggataaaaaccagcattatttatttgagca

SEQ ID NO: 80900 - DNA, 40 bp, Homo sapiens
gctcaaataaataatgctggtttttatcctactgtttgct

SEQ ID NO: 80901 - DNA, 40 bp, Homo sapiens
agcaaacagtaggataaaaaccagcattatttatttgagc

SEQ ID NO: 80902 - DNA, 40 bp, Homo sapiens
ctcaaataaataatgctggtttttatcctactgtttgctt

SEQ ID NO: 80903 - DNA, 40 bp, Homo sapiens
aagcaaacagtaggataaaaaccagcattatttatttgag

SEQ ID NO: 80904 - DNA, 40 bp, Homo sapiens
tcaaataaataatgctggtttttatcctactgtttgctta

SEQ ID NO: 80905 - DNA, 40 bp, Homo sapiens
taagcaaacagtaggataaaaaccagcattatttatttga

SEQ ID NO: 80906 - DNA, 40 bp, Homo sapiens
caaataaataatgctggtttttatcctactgtttgcttaa

SEQ ID NO: 80907 - DNA, 40 bp, Homo sapiens
ttaagcaaacagtaggataaaaaccagcattatttatttg

SEQ ID NO: 80908 - DNA, 40 bp, Homo sapiens
aaataaataatgctggtttttatcctactgtttgcttaat

SEQ ID NO: 80909 - DNA, 40 bp, Homo sapiens
attaagcaaacagtaggataaaaaccagcattatttattt

SEQ ID NO: 80910 - DNA, 40 bp, Homo sapiens
aataaataatgctggtttttatcctactgtttgcttaatg

SEQ ID NO: 80911 - DNA, 40 bp, Homo sapiens
cattaagcaaacagtaggataaaaaccagcattatttatt

SEQ ID NO: 80912 - DNA, 40 bp, Homo sapiens
ataaataatgctggtttttatcctactgtttgcttaatgt

SEQ ID NO: 80913 - DNA, 40 bp, Homo sapiens
acattaagcaaacagtaggataaaaaccagcattatttat

SEQ ID NO: 80914 - DNA, 40 bp, Homo sapiens
taaataatgctggtttttatcctactgtttgcttaatgtg

SEQ ID NO: 80915 - DNA, 40 bp, Homo sapiens
cacattaagcaaacagtaggataaaaaccagcattattta

SEQ ID NO: 80916 - DNA, 40 bp, Homo sapiens
aaataatgctggtttttatcctactgtttgcttaatgtgg

SEQ ID NO: 80917 - DNA, 40 bp, Homo sapiens
ccacattaagcaaacagtaggataaaaaccagcattattt

SEQ ID NO: 80918 - DNA, 40 bp, Homo sapiens
aataatgctggtttttatcctactgtttgcttaatgtgga

SEQ ID NO: 80919 - DNA, 40 bp, Homo sapiens
tccacattaagcaaacagtaggataaaaaccagcattatt

SEQ ID NO: 80920 - DNA, 40 bp, Homo sapiens
ataatgctggtttttatcctactgtttgcttaatgtggac

SEQ ID NO: 80921 - DNA, 40 bp, Homo sapiens
gtccacattaagcaaacagtaggataaaaaccagcattat

SEQ ID NO: 80922 - DNA, 40 bp, Homo sapiens
taatgctggtttttatcctactgtttgcttaatgtggact

SEQ ID NO: 80923 - DNA, 40 bp, Homo sapiens
agtccacattaagcaaacagtaggataaaaaccagcatta

SEQ ID NO: 80924 - DNA, 40 bp, Homo sapiens
aatgctggtttttatcctactgtttgcttaatgtggacta

SEQ ID NO: 80925 - DNA, 40 bp, Homo sapiens
tagtccacattaagcaaacagtaggataaaaaccagcatt

SEQ ID NO: 80926 - DNA, 40 bp, Homo sapiens
atgctggtttttatcctactgtttgcttaatgtggactag

SEQ ID NO: 80927 - DNA, 40 bp, Homo sapiens
ctagtccacattaagcaaacagtaggataaaaaccagcat

SEQ ID NO: 80928 - DNA, 40 bp, Homo sapiens
tgctggtttttatcctactgtttgcttaatgtggactagc

SEQ ID NO: 80929 - DNA, 40 bp, Homo sapiens
gctagtccacattaagcaaacagtaggataaaaaccagca

SEQ ID NO: 80930 - DNA, 40 bp, Homo sapiens
gctggtttttatcctactgtttgcttaatgtggactagcc

SEQ ID NO: 80931 - DNA, 40 bp, Homo sapiens
ggctagtccacattaagcaaacagtaggataaaaaccagc

SEQ ID NO: 80932 - DNA, 40 bp, Homo sapiens
ctggtttttatcctactgtttgcttaatgtggactagcct

SEQ ID NO: 80933 - DNA, 40 bp, Homo sapiens
aggctagtccacattaagcaaacagtaggataaaaaccag

SEQ ID NO: 80934 - DNA, 40 bp, Homo sapiens
tggtttttatcctactgtttgcttaatgtggactagcctc

SEQ ID NO: 80935 - DNA, 40 bp, Homo sapiens
gaggctagtccacattaagcaaacagtaggataaaaacca

SEQ ID NO: 80936 - DNA, 40 bp, Homo sapiens
ggtttttatcctactgtttgcttaatgtggactagcctct

SEQ ID NO: 80937 - DNA, 40 bp, Homo sapiens
agaggctagtccacattaagcaaacagtaggataaaaacc

SEQ ID NO: 80938 - DNA, 40 bp, Homo sapiens
gtttttatcctactgtttgcttaatgtggactagcctctt

SEQ ID NO: 80939 - DNA, 40 bp, Homo sapiens
aagaggctagtccacattaagcaaacagtaggataaaaac

SEQ ID NO: 80940 - DNA, 40 bp, Homo sapiens
tttttatcctactgtttgcttaatgtggactagcctctta

SEQ ID NO: 80941 - DNA, 40 bp, Homo sapiens
taagaggctagtccacattaagcaaacagtaggataaaaa

SEQ ID NO: 80942 - DNA, 40 bp, Homo sapiens
ttttatcctactgtttgcttaatgtggactagcctcttat

SEQ ID NO: 80943 - DNA, 40 bp, Homo sapiens
ataagaggctagtccacattaagcaaacagtaggataaaa

SEQ ID NO: 80944 - DNA, 40 bp, Homo sapiens
tttatcctactgtttgcttaatgtggactagcctcttatt

SEQ ID NO: 80945 - DNA, 40 bp, Homo sapiens
aataagaggctagtccacattaagcaaacagtaggataaa

SEQ ID NO: 80946 - DNA, 40 bp, Homo sapiens
ttatcctactgtttgcttaatgtggactagcctcttattc

SEQ ID NO: 80947 - DNA, 40 bp, Homo sapiens
gaataagaggctagtccacattaagcaaacagtaggataa

SEQ ID NO: 80948 - DNA, 40 bp, Homo sapiens
tatcctactgtttgcttaatgtggactagcctcttattcc

SEQ ID NO: 80949 - DNA, 40 bp, Homo sapiens
ggaataagaggctagtccacattaagcaaacagtaggata

SEQ ID NO: 80950 - DNA, 40 bp, Homo sapiens
atcctactgtttgcttaatgtggactagcctcttattccc

SEQ ID NO: 80951 - DNA, 40 bp, Homo sapiens
gggaataagaggctagtccacattaagcaaacagtaggat

SEQ ID NO: 80952 - DNA, 40 bp, Homo sapiens
tcctactgtttgcttaatgtggactagcctcttattccca

SEQ ID NO: 80953 - DNA, 40 bp, Homo sapiens
tgggaataagaggctagtccacattaagcaaacagtagga

SEQ ID NO: 80954 - DNA, 40 bp, Homo sapiens
cctactgtttgcttaatgtggactagcctcttattcccat

SEQ ID NO: 80955 - DNA, 40 bp, Homo sapiens
atgggaataagaggctagtccacattaagcaaacagtagg

SEQ ID NO: 80956 - DNA, 40 bp, Homo sapiens
ctactgtttgcttaatgtggactagcctcttattcccatt

SEQ ID NO: 80957 - DNA, 40 bp, Homo sapiens
aatgggaataagaggctagtccacattaagcaaacagtag

SEQ ID NO: 80958 - DNA, 40 bp, Homo sapiens
tactgtttgcttaatgtggactagcctcttattcccattc

SEQ ID NO: 80959 - DNA, 40 bp, Homo sapiens
gaatgggaataagaggctagtccacattaagcaaacagta

SEQ ID NO: 80960 - DNA, 40 bp, Homo sapiens
actgtttgcttaatgtggactagcctcttattcccattct

SEQ ID NO: 80961 - DNA, 40 bp, Homo sapiens
agaatgggaataagaggctagtccacattaagcaaacagt

SEQ ID NO: 80962 - DNA, 40 bp, Homo sapiens
ctgtttgcttaatgtggactagcctcttattcccattcta

SEQ ID NO: 80963 - DNA, 40 bp, Homo sapiens
tagaatgggaataagaggctagtccacattaagcaaacag

SEQ ID NO: 80964 - DNA, 40 bp, Homo sapiens
tgtttgcttaatgtggactagcctcttattcccattctat

SEQ ID NO: 80965 - DNA, 40 bp, Homo sapiens
atagaatgggaataagaggctagtccacattaagcaaaca

SEQ ID NO: 80966 - DNA, 40 bp, Homo sapiens
gtttgcttaatgtggactagcctcttattcccattctatg

SEQ ID NO: 80967 - DNA, 40 bp, Homo sapiens
catagaatgggaataagaggctagtccacattaagcaaac

SEQ ID NO: 80968 - DNA, 40 bp, Homo sapiens
tttgcttaatgtggactagcctcttattcccattctatgt

SEQ ID NO: 80969 - DNA, 40 bp, Homo sapiens
acatagaatgggaataagaggctagtccacattaagcaaa

SEQ ID NO: 80970 - DNA, 40 bp, Homo sapiens
ttgcttaatgtggactagcctcttattcccattctatgtt

SEQ ID NO: 80971 - DNA, 40 bp, Homo sapiens
aacatagaatgggaataagaggctagtccacattaagcaa

SEQ ID NO: 80972 - DNA, 40 bp, Homo sapiens
tgcttaatgtggactagcctcttattcccattctatgttt

SEQ ID NO: 80973 - DNA, 40 bp, Homo sapiens
aaacatagaatgggaataagaggctagtccacattaagca

SEQ ID NO: 80974 - DNA, 40 bp, Homo sapiens
gcttaatgtggactagcctcttattcccattctatgttta

SEQ ID NO: 80975 - DNA, 40 bp, Homo sapiens
taaacatagaatgggaataagaggctagtccacattaagc

SEQ ID NO: 80976 - DNA, 40 bp, Homo sapiens
cttaatgtggactagcctcttattcccattctatgtttac

SEQ ID NO: 80977 - DNA, 40 bp, Homo sapiens
gtaaacatagaatgggaataagaggctagtccacattaag

SEQ ID NO: 80978 - DNA, 40 bp, Homo sapiens
ttaatgtggactagcctcttattcccattctatgtttacc

SEQ ID NO: 80979 - DNA, 40 bp, Homo sapiens
ggtaaacatagaatgggaataagaggctagtccacattaa

SEQ ID NO: 80980 - DNA, 40 bp, Homo sapiens
taatgtggactagcctcttattcccattctatgtttacct

SEQ ID NO: 80981 - DNA, 40 bp, Homo sapiens
aggtaaacatagaatgggaataagaggctagtccacatta

SEQ ID NO: 80982 - DNA, 40 bp, Homo sapiens
aatgtggactagcctcttattcccattctatgtttacctc

SEQ ID NO: 80983 - DNA, 40 bp, Homo sapiens
gaggtaaacatagaatgggaataagaggctagtccacatt

SEQ ID NO: 80984 - DNA, 40 bp, Homo sapiens
atgtggactagcctcttattcccattctatgtttacctct

SEQ ID NO: 80985 - DNA, 40 bp, Homo sapiens
agaggtaaacatagaatgggaataagaggctagtccacat

SEQ ID NO: 80986 - DNA, 40 bp, Homo sapiens
tgtggactagcctcttattcccattctatgtttacctctc

SEQ ID NO: 80987 - DNA, 40 bp, Homo sapiens
gagaggtaaacatagaatgggaataagaggctagtccaca

SEQ ID NO: 80988 - DNA, 40 bp, Homo sapiens
gtggactagcctcttattcccattctatgtttacctctct

SEQ ID NO: 80989 - DNA, 40 bp, Homo sapiens
agagaggtaaacatagaatgggaataagaggctagtccac

SEQ ID NO: 80990 - DNA, 40 bp, Homo sapiens
tggactagcctcttattcccattctatgtttacctctctt

SEQ ID NO: 80991 - DNA, 40 bp, Homo sapiens
aagagaggtaaacatagaatgggaataagaggctagtcca

SEQ ID NO: 80992 - DNA, 40 bp, Homo sapiens
ggactagcctcttattcccattctatgtttacctctctta

SEQ ID NO: 80993 - DNA, 40 bp, Homo sapiens
taagagaggtaaacatagaatgggaataagaggctagtcc

SEQ ID NO: 80994 - DNA, 40 bp, Homo sapiens
gactagcctcttattcccattctatgtttacctctcttaa

SEQ ID NO: 80995 - DNA, 40 bp, Homo sapiens
ttaagagaggtaaacatagaatgggaataagaggctagtc

SEQ ID NO: 80996 - DNA, 40 bp, Homo sapiens
actagcctcttattcccattctatgtttacctctcttaaa

SEQ ID NO: 80997 - DNA, 40 bp, Homo sapiens
tttaagagaggtaaacatagaatgggaataagaggctagt

SEQ ID NO: 80998 - DNA, 40 bp, Homo sapiens
ctagcctcttattcccattctatgtttacctctcttaaaa

SEQ ID NO: 80999 - DNA, 40 bp, Homo sapiens
ttttaagagaggtaaacatagaatgggaataagaggctag

SEQ ID NO: 81000 - DNA, 40 bp, Homo sapiens
tagcctcttattcccattctatgtttacctctcttaaaat

SEQ ID NO: 81001 - DNA, 40 bp, Homo sapiens
attttaagagaggtaaacatagaatgggaataagaggcta

SEQ ID NO: 81002 - DNA, 40 bp, Homo sapiens
agcctcttattcccattctatgtttacctctcttaaaata

SEQ ID NO: 81003 - DNA, 40 bp, Homo sapiens
tattttaagagaggtaaacatagaatgggaataagaggct

SEQ ID NO: 81004 - DNA, 40 bp, Homo sapiens
gcctcttattcccattctatgtttacctctcttaaaatat

SEQ ID NO: 81005 - DNA, 40 bp, Homo sapiens
atattttaagagaggtaaacatagaatgggaataagaggc

SEQ ID NO: 81006 - DNA, 40 bp, Homo sapiens
cctcttattcccattctatgtttacctctcttaaaatatt

SEQ ID NO: 81007 - DNA, 40 bp, Homo sapiens
aatattttaagagaggtaaacatagaatgggaataagagg

SEQ ID NO: 81008 - DNA, 40 bp, Homo sapiens
ctcttattcccattctatgtttacctctcttaaaatattg

SEQ ID NO: 81009 - DNA, 40 bp, Homo sapiens
caatattttaagagaggtaaacatagaatgggaataagag

SEQ ID NO: 81010 - DNA, 40 bp, Homo sapiens
tcttattcccattctatgtttacctctcttaaaatattgg

SEQ ID NO: 81011 - DNA, 40 bp, Homo sapiens
ccaatattttaagagaggtaaacatagaatgggaataaga

SEQ ID NO: 81012 - DNA, 40 bp, Homo sapiens
cttattcccattctatgtttacctctcttaaaatattggt

SEQ ID NO: 81013 - DNA, 40 bp, Homo sapiens
accaatattttaagagaggtaaacatagaatgggaataag

SEQ ID NO: 81014 - DNA, 40 bp, Homo sapiens
ttattcccattctatgtttacctctcttaaaatattggtc

SEQ ID NO: 81015 - DNA, 40 bp, Homo sapiens
gaccaatattttaagagaggtaaacatagaatgggaataa

SEQ ID NO: 81016 - DNA, 40 bp, Homo sapiens
tattcccattctatgtttacctctcttaaaatattggtca

SEQ ID NO: 81017 - DNA, 40 bp, Homo sapiens
tgaccaatattttaagagaggtaaacatagaatgggaata

SEQ ID NO: 81018 - DNA, 40 bp, Homo sapiens
attcccattctatgtttacctctcttaaaatattggtcac

SEQ ID NO: 81019 - DNA, 40 bp, Homo sapiens
gtgaccaatattttaagagaggtaaacatagaatgggaat

SEQ ID NO: 81020 - DNA, 40 bp, Homo sapiens
ttcccattctatgtttacctctcttaaaatattggtcacg

SEQ ID NO: 81021 - DNA, 40 bp, Homo sapiens
cgtgaccaatattttaagagaggtaaacatagaatgggaa

SEQ ID NO: 81022 - DNA, 40 bp, Homo sapiens
tcccattctatgtttacctctcttaaaatattggtcacgc

SEQ ID NO: 81023 - DNA, 40 bp, Homo sapiens
gcgtgaccaatattttaagagaggtaaacatagaatggga

SEQ ID NO: 81024 - DNA, 40 bp, Homo sapiens
cccattctatgtttacctctcttaaaatattggtcacgct

SEQ ID NO: 81025 - DNA, 40 bp, Homo sapiens
agcgtgaccaatattttaagagaggtaaacatagaatggg

SEQ ID NO: 81026 - DNA, 40 bp, Homo sapiens
ccattctatgtttacctctcttaaaatattggtcacgctt

SEQ ID NO: 81027 - DNA, 40 bp, Homo sapiens
aagcgtgaccaatattttaagagaggtaaacatagaatgg

SEQ ID NO: 81028 - DNA, 40 bp, Homo sapiens
cattctatgtttacctctcttaaaatattggtcacgcttt

SEQ ID NO: 81029 - DNA, 40 bp, Homo sapiens
aaagcgtgaccaatattttaagagaggtaaacatagaatg

SEQ ID NO: 81030 - DNA, 40 bp, Homo sapiens
attctatgtttacctctcttaaaatattggtcacgctttc

SEQ ID NO: 81031 - DNA, 40 bp, Homo sapiens
gaaagcgtgaccaatattttaagagaggtaaacatagaat

SEQ ID NO: 81032 - DNA, 40 bp, Homo sapiens
ttctatgtttacctctcttaaaatattggtcacgctttct

SEQ ID NO: 81033 - DNA, 40 bp, Homo sapiens
agaaagcgtgaccaatattttaagagaggtaaacatagaa

SEQ ID NO: 81034 - DNA, 40 bp, Homo sapiens
tctatgtttacctctcttaaaatattggtcacgctttctt

SEQ ID NO: 81035 - DNA, 40 bp, Homo sapiens
aagaaagcgtgaccaatattttaagagaggtaaacataga

SEQ ID NO: 81036 - DNA, 40 bp, Homo sapiens
ctatgtttacctctcttaaaatattggtcacgctttcttg

SEQ ID NO: 81037 - DNA, 40 bp, Homo sapiens
caagaaagcgtgaccaatattttaagagaggtaaacatag

SEQ ID NO: 81038 - DNA, 40 bp, Homo sapiens
tatgtttacctctcttaaaatattggtcacgctttcttga

SEQ ID NO: 81039 - DNA, 40 bp, Homo sapiens
tcaagaaagcgtgaccaatattttaagagaggtaaacata

SEQ ID NO: 81040 - DNA, 40 bp, Homo sapiens
atgtttacctctcttaaaatattggtcacgctttcttgaa

SEQ ID NO: 81041 - DNA, 40 bp, Homo sapiens
ttcaagaaagcgtgaccaatattttaagagaggtaaacat

SEQ ID NO: 81042 - DNA, 40 bp, Homo sapiens
tgtttacctctcttaaaatattggtcacgctttcttgaat

SEQ ID NO: 81043 - DNA, 40 bp, Homo sapiens
attcaagaaagcgtgaccaatattttaagagaggtaaaca

SEQ ID NO: 81044 - DNA, 40 bp, Homo sapiens
gtttacctctcttaaaatattggtcacgctttcttgaatt

SEQ ID NO: 81045 - DNA, 40 bp, Homo sapiens
aattcaagaaagcgtgaccaatattttaagagaggtaaac

SEQ ID NO: 81046 - DNA, 40 bp, Homo sapiens
tttacctctcttaaaatattggtcacgctttcttgaatta

SEQ ID NO: 81047 - DNA, 40 bp, Homo sapiens
taattcaagaaagcgtgaccaatattttaagagaggtaaa

SEQ ID NO: 81048 - DNA, 40 bp, Homo sapiens
ttacctctcttaaaatattggtcacgctttcttgaattat

SEQ ID NO: 81049 - DNA, 40 bp, Homo sapiens
ataattcaagaaagcgtgaccaatattttaagagaggtaa

SEQ ID NO: 81050 - DNA, 40 bp, Homo sapiens
tacctctcttaaaatattggtcacgctttcttgaattata

SEQ ID NO: 81051 - DNA, 40 bp, Homo sapiens
tataattcaagaaagcgtgaccaatattttaagagaggta

SEQ ID NO: 81052 - DNA, 40 bp, Homo sapiens
acctctcttaaaatattggtcacgctttcttgaattatag

SEQ ID NO: 81053 - DNA, 40 bp, Homo sapiens
ctataattcaagaaagcgtgaccaatattttaagagaggt

SEQ ID NO: 81054 - DNA, 40 bp, Homo sapiens
cctctcttaaaatattggtcacgctttcttgaattataga

SEQ ID NO: 81055 - DNA, 40 bp, Homo sapiens
tctataattcaagaaagcgtgaccaatattttaagagagg

SEQ ID NO: 81056 - DNA, 40 bp, Homo sapiens
ctctcttaaaatattggtcacgctttcttgaattatagat

SEQ ID NO: 81057 - DNA, 40 bp, Homo sapiens
atctataattcaagaaagcgtgaccaatattttaagagag

SEQ ID NO: 81058 - DNA, 40 bp, Homo sapiens
tctcttaaaatattggtcacgctttcttgaattatagatc

SEQ ID NO: 81059 - DNA, 40 bp, Homo sapiens
gatctataattcaagaaagcgtgaccaatattttaagaga

SEQ ID NO: 81060 - DNA, 40 bp, Homo sapiens
ctcttaaaatattggtcacgctttcttgaattatagatct

SEQ ID NO: 81061 - DNA, 40 bp, Homo sapiens
agatctataattcaagaaagcgtgaccaatattttaagag

SEQ ID NO: 81062 - DNA, 40 bp, Homo sapiens
tcttaaaatattggtcacgctttcttgaattatagatcta

SEQ ID NO: 81063 - DNA, 40 bp, Homo sapiens
tagatctataattcaagaaagcgtgaccaatattttaaga

SEQ ID NO: 81064 - DNA, 40 bp, Homo sapiens
cttaaaatattggtcacgctttcttgaattatagatctat

SEQ ID NO: 81065 - DNA, 40 bp, Homo sapiens
atagatctataattcaagaaagcgtgaccaatattttaag

SEQ ID NO: 81066 - DNA, 40 bp, Homo sapiens
ttaaaatattggtcacgctttcttgaattatagatctatt

SEQ ID NO: 81067 - DNA, 40 bp, Homo sapiens
aatagatctataattcaagaaagcgtgaccaatattttaa

SEQ ID NO: 81068 - DNA, 40 bp, Homo sapiens
taaaatattggtcacgctttcttgaattatagatctatta

SEQ ID NO: 81069 - DNA, 40 bp, Homo sapiens
taatagatctataattcaagaaagcgtgaccaatatttta

SEQ ID NO: 81070 - DNA, 40 bp, Homo sapiens
aaaatattggtcacgctttcttgaattatagatctattag

SEQ ID NO: 81071 - DNA, 40 bp, Homo sapiens
ctaatagatctataattcaagaaagcgtgaccaatatttt

SEQ ID NO: 81072 - DNA, 40 bp, Homo sapiens
aaatattggtcacgctttcttgaattatagatctattagg

SEQ ID NO: 81073 - DNA, 40 bp, Homo sapiens
cctaatagatctataattcaagaaagcgtgaccaatattt

SEQ ID NO: 81074 - DNA, 40 bp, Homo sapiens
aatattggtcacgctttcttgaattatagatctattagga

SEQ ID NO: 81075 - DNA, 40 bp, Homo sapiens
tcctaatagatctataattcaagaaagcgtgaccaatatt

SEQ ID NO: 81076 - DNA, 40 bp, Homo sapiens
atattggtcacgctttcttgaattatagatctattaggaa

SEQ ID NO: 81077 - DNA, 40 bp, Homo sapiens
ttcctaatagatctataattcaagaaagcgtgaccaatat

SEQ ID NO: 81078 - DNA, 40 bp, Homo sapiens
tattggtcacgctttcttgaattatagatctattaggaaa

SEQ ID NO: 81079 - DNA, 40 bp, Homo sapiens
tttcctaatagatctataattcaagaaagcgtgaccaata

SEQ ID NO: 81080 - DNA, 40 bp, Homo sapiens
attggtcacgctttcttgaattatagatctattaggaaaa

SEQ ID NO: 81081 - DNA, 40 bp, Homo sapiens
ttttcctaatagatctataattcaagaaagcgtgaccaat

SEQ ID NO: 81082 - DNA, 40 bp, Homo sapiens
ttggtcacgctttcttgaattatagatctattaggaaaat

SEQ ID NO: 81083 - DNA, 40 bp, Homo sapiens
attttcctaatagatctataattcaagaaagcgtgaccaa

SEQ ID NO: 81084 - DNA, 40 bp, Homo sapiens
tggtcacgctttcttgaattatagatctattaggaaaatt

SEQ ID NO: 81085 - DNA, 40 bp, Homo sapiens
aattttcctaatagatctataattcaagaaagcgtgacca

SEQ ID NO: 81086 - DNA, 40 bp, Homo sapiens
ggtcacgctttcttgaattatagatctattaggaaaattc

SEQ ID NO: 81087 - DNA, 40 bp, Homo sapiens
gaattttcctaatagatctataattcaagaaagcgtgacc

SEQ ID NO: 81088 - DNA, 40 bp, Homo sapiens
gtcacgctttcttgaattatagatctattaggaaaattca

SEQ ID NO: 81089 - DNA, 40 bp, Homo sapiens
tgaattttcctaatagatctataattcaagaaagcgtgac

SEQ ID NO: 81090 - DNA, 40 bp, Homo sapiens
tcacgctttcttgaattatagatctattaggaaaattcat

SEQ ID NO: 81091 - DNA, 40 bp, Homo sapiens
atgaattttcctaatagatctataattcaagaaagcgtga

SEQ ID NO: 81092 - DNA, 40 bp, Homo sapiens
cacgctttcttgaattatagatctattaggaaaattcatg

SEQ ID NO: 81093 - DNA, 40 bp, Homo sapiens
catgaattttcctaatagatctataattcaagaaagcgtg

SEQ ID NO: 81094 - DNA, 40 bp, Homo sapiens
acgctttcttgaattatagatctattaggaaaattcatga

SEQ ID NO: 81095 - DNA, 40 bp, Homo sapiens
tcatgaattttcctaatagatctataattcaagaaagcgt

SEQ ID NO: 81096 - DNA, 40 bp, Homo sapiens
cgctttcttgaattatagatctattaggaaaattcatgaa

SEQ ID NO: 81097 - DNA, 40 bp, Homo sapiens
ttcatgaattttcctaatagatctataattcaagaaagcg

SEQ ID NO: 81098 - DNA, 40 bp, Homo sapiens
gctttcttgaattatagatctattaggaaaattcatgaac

SEQ ID NO: 81099 - DNA, 40 bp, Homo sapiens
gttcatgaattttcctaatagatctataattcaagaaagc

SEQ ID NO: 81100 - DNA, 40 bp, Homo sapiens
ctttcttgaattatagatctattaggaaaattcatgaact

SEQ ID NO: 81101 - DNA, 40 bp, Homo sapiens
agttcatgaattttcctaatagatctataattcaagaaag

SEQ ID NO: 81102 - DNA, 40 bp, Homo sapiens
tttcttgaattatagatctattaggaaaattcatgaactg

SEQ ID NO: 81103 - DNA, 40 bp, Homo sapiens
cagttcatgaattttcctaatagatctataattcaagaaa

SEQ ID NO: 81104 - DNA, 40 bp, Homo sapiens
ttcttgaattatagatctattaggaaaattcatgaactgt

SEQ ID NO: 81105 - DNA, 40 bp, Homo sapiens
acagttcatgaattttcctaatagatctataattcaagaa

SEQ ID NO: 81106 - DNA, 40 bp, Homo sapiens
tcttgaattatagatctattaggaaaattcatgaactgta

SEQ ID NO: 81107 - DNA, 40 bp, Homo sapiens
tacagttcatgaattttcctaatagatctataattcaaga

SEQ ID NO: 81108 - DNA, 40 bp, Homo sapiens
cttgaattatagatctattaggaaaattcatgaactgtag

SEQ ID NO: 81109 - DNA, 40 bp, Homo sapiens
ctacagttcatgaattttcctaatagatctataattcaag

SEQ ID NO: 81110 - DNA, 40 bp, Homo sapiens
ttgaattatagatctattaggaaaattcatgaactgtagc

SEQ ID NO: 81111 - DNA, 40 bp, Homo sapiens
gctacagttcatgaattttcctaatagatctataattcaa

SEQ ID NO: 81112 - DNA, 40 bp, Homo sapiens
tgaattatagatctattaggaaaattcatgaactgtagct

SEQ ID NO: 81113 - DNA, 40 bp, Homo sapiens
agctacagttcatgaattttcctaatagatctataattca

SEQ ID NO: 81114 - DNA, 40 bp, Homo sapiens
gaattatagatctattaggaaaattcatgaactgtagcta

SEQ ID NO: 81115 - DNA, 40 bp, Homo sapiens
tagctacagttcatgaattttcctaatagatctataattc

SEQ ID NO: 81116 - DNA, 40 bp, Homo sapiens
aattatagatctattaggaaaattcatgaactgtagctaa

SEQ ID NO: 81117 - DNA, 40 bp, Homo sapiens
ttagctacagttcatgaattttcctaatagatctataatt

SEQ ID NO: 81118 - DNA, 40 bp, Homo sapiens
attatagatctattaggaaaattcatgaactgtagctaat

SEQ ID NO: 81119 - DNA, 40 bp, Homo sapiens
attagctacagttcatgaattttcctaatagatctataat

SEQ ID NO: 81120 - DNA, 40 bp, Homo sapiens
ttatagatctattaggaaaattcatgaactgtagctaatt

SEQ ID NO: 81121 - DNA, 40 bp, Homo sapiens
aattagctacagttcatgaattttcctaatagatctataa

SEQ ID NO: 81122 - DNA, 40 bp, Homo sapiens
tatagatctattaggaaaattcatgaactgtagctaattt

SEQ ID NO: 81123 - DNA, 40 bp, Homo sapiens
aaattagctacagttcatgaattttcctaatagatctata

SEQ ID NO: 81124 - DNA, 40 bp, Homo sapiens
atagatctattaggaaaattcatgaactgtagctaatttt

SEQ ID NO: 81125 - DNA, 40 bp, Homo sapiens
aaaattagctacagttcatgaattttcctaatagatctat

SEQ ID NO: 81126 - DNA, 40 bp, Homo sapiens
tagatctattaggaaaattcatgaactgtagctaattttc

SEQ ID NO: 81127 - DNA, 40 bp, Homo sapiens
gaaaattagctacagttcatgaattttcctaatagatcta

SEQ ID NO: 81128 - DNA, 40 bp, Homo sapiens
agatctattaggaaaattcatgaactgtagctaattttca

SEQ ID NO: 81129 - DNA, 40 bp, Homo sapiens
tgaaaattagctacagttcatgaattttcctaatagatct

SEQ ID NO: 81130 - DNA, 40 bp, Homo sapiens
gatctattaggaaaattcatgaactgtagctaattttcat

SEQ ID NO: 81131 - DNA, 40 bp, Homo sapiens
atgaaaattagctacagttcatgaattttcctaatagatc

SEQ ID NO: 81132 - DNA, 40 bp, Homo sapiens
atctattaggaaaattcatgaactgtagctaattttcatt

SEQ ID NO: 81133 - DNA, 40 bp, Homo sapiens
aatgaaaattagctacagttcatgaattttcctaatagat

SEQ ID NO: 81134 - DNA, 40 bp, Homo sapiens
tctattaggaaaattcatgaactgtagctaattttcattg

SEQ ID NO: 81135 - DNA, 40 bp, Homo sapiens
caatgaaaattagctacagttcatgaattttcctaataga

SEQ ID NO: 81136 - DNA, 40 bp, Homo sapiens
ctattaggaaaattcatgaactgtagctaattttcattgt

SEQ ID NO: 81137 - DNA, 40 bp, Homo sapiens
acaatgaaaattagctacagttcatgaattttcctaatag

SEQ ID NO: 81138 - DNA, 40 bp, Homo sapiens
tattaggaaaattcatgaactgtagctaattttcattgtt

SEQ ID NO: 81139 - DNA, 40 bp, Homo sapiens
aacaatgaaaattagctacagttcatgaattttcctaata

SEQ ID NO: 81140 - DNA, 40 bp, Homo sapiens
attaggaaaattcatgaactgtagctaattttcattgttc

SEQ ID NO: 81141 - DNA, 40 bp, Homo sapiens
gaacaatgaaaattagctacagttcatgaattttcctaat

SEQ ID NO: 81142 - DNA, 40 bp, Homo sapiens
ttaggaaaattcatgaactgtagctaattttcattgttca

SEQ ID NO: 81143 - DNA, 40 bp, Homo sapiens
tgaacaatgaaaattagctacagttcatgaattttcctaa

SEQ ID NO: 81144 - DNA, 40 bp, Homo sapiens
taggaaaattcatgaactgtagctaattttcattgttcat

SEQ ID NO: 81145 - DNA, 40 bp, Homo sapiens
atgaacaatgaaaattagctacagttcatgaattttccta

SEQ ID NO: 81146 - DNA, 40 bp, Homo sapiens
aggaaaattcatgaactgtagctaattttcattgttcatg

SEQ ID NO: 81147 - DNA, 40 bp, Homo sapiens
catgaacaatgaaaattagctacagttcatgaattttcct

SEQ ID NO: 81148 - DNA, 40 bp, Homo sapiens
ggaaaattcatgaactgtagctaattttcattgttcatgc

SEQ ID NO: 81149 - DNA, 40 bp, Homo sapiens
gcatgaacaatgaaaattagctacagttcatgaattttcc

SEQ ID NO: 81150 - DNA, 40 bp, Homo sapiens
gaaaattcatgaactgtagctaattttcattgttcatgct

SEQ ID NO: 81151 - DNA, 40 bp, Homo sapiens
agcatgaacaatgaaaattagctacagttcatgaattttc

SEQ ID NO: 81152 - DNA, 40 bp, Homo sapiens
aaaattcatgaactgtagctaattttcattgttcatgctc

SEQ ID NO: 81153 - DNA, 40 bp, Homo sapiens
gagcatgaacaatgaaaattagctacagttcatgaatttt

SEQ ID NO: 81154 - DNA, 40 bp, Homo sapiens
aaattcatgaactgtagctaattttcattgttcatgctcc

SEQ ID NO: 81155 - DNA, 40 bp, Homo sapiens
ggagcatgaacaatgaaaattagctacagttcatgaattt

SEQ ID NO: 81156 - DNA, 40 bp, Homo sapiens
aattcatgaactgtagctaattttcattgttcatgctcca

SEQ ID NO: 81157 - DNA, 40 bp, Homo sapiens
tggagcatgaacaatgaaaattagctacagttcatgaatt

SEQ ID NO: 81158 - DNA, 40 bp, Homo sapiens
attcatgaactgtagctaattttcattgttcatgctccag

SEQ ID NO: 81159 - DNA, 40 bp, Homo sapiens
ctggagcatgaacaatgaaaattagctacagttcatgaat

SEQ ID NO: 81160 - DNA, 40 bp, Homo sapiens
ttcatgaactgtagctaattttcattgttcatgctccaga

SEQ ID NO: 81161 - DNA, 40 bp, Homo sapiens
tctggagcatgaacaatgaaaattagctacagttcatgaa

SEQ ID NO: 81162 - DNA, 40 bp, Homo sapiens
tcatgaactgtagctaattttcattgttcatgctccagat

SEQ ID NO: 81163 - DNA, 40 bp, Homo sapiens
atctggagcatgaacaatgaaaattagctacagttcatga

SEQ ID NO: 81164 - DNA, 40 bp, Homo sapiens
catgaactgtagctaattttcattgttcatgctccagatt

SEQ ID NO: 81165 - DNA, 40 bp, Homo sapiens
aatctggagcatgaacaatgaaaattagctacagttcatg

SEQ ID NO: 81166 - DNA, 40 bp, Homo sapiens
atgaactgtagctaattttcattgttcatgctccagattt

SEQ ID NO: 81167 - DNA, 40 bp, Homo sapiens
aaatctggagcatgaacaatgaaaattagctacagttcat

SEQ ID NO: 81168 - DNA, 40 bp, Homo sapiens
tgaactgtagctaattttcattgttcatgctccagattta

SEQ ID NO: 81169 - DNA, 40 bp, Homo sapiens
taaatctggagcatgaacaatgaaaattagctacagttca

SEQ ID NO: 81170 - DNA, 40 bp, Homo sapiens
gaactgtagctaattttcattgttcatgctccagatttat

SEQ ID NO: 81171 - DNA, 40 bp, Homo sapiens
ataaatctggagcatgaacaatgaaaattagctacagttc

SEQ ID NO: 81172 - DNA, 40 bp, Homo sapiens
aactgtagctaattttcattgttcatgctccagatttatt

SEQ ID NO: 81173 - DNA, 40 bp, Homo sapiens
aataaatctggagcatgaacaatgaaaattagctacagtt

SEQ ID NO: 81174 - DNA, 40 bp, Homo sapiens
actgtagctaattttcattgttcatgctccagatttattt

SEQ ID NO: 81175 - DNA, 40 bp, Homo sapiens
aaataaatctggagcatgaacaatgaaaattagctacagt

SEQ ID NO: 81176 - DNA, 40 bp, Homo sapiens
ctgtagctaattttcattgttcatgctccagatttatttt

SEQ ID NO: 81177 - DNA, 40 bp, Homo sapiens
aaaataaatctggagcatgaacaatgaaaattagctacag

SEQ ID NO: 81178 - DNA, 40 bp, Homo sapiens
tgtagctaattttcattgttcatgctccagatttattttg

SEQ ID NO: 81179 - DNA, 40 bp, Homo sapiens
caaaataaatctggagcatgaacaatgaaaattagctaca

SEQ ID NO: 81180 - DNA, 40 bp, Homo sapiens
gtagctaattttcattgttcatgctccagatttattttga

SEQ ID NO: 81181 - DNA, 40 bp, Homo sapiens
tcaaaataaatctggagcatgaacaatgaaaattagctac

SEQ ID NO: 81182 - DNA, 40 bp, Homo sapiens
tagctaattttcattgttcatgctccagatttattttgaa

SEQ ID NO: 81183 - DNA, 40 bp, Homo sapiens
ttcaaaataaatctggagcatgaacaatgaaaattagcta

SEQ ID NO: 81184 - DNA, 40 bp, Homo sapiens
agctaattttcattgttcatgctccagatttattttgaaa

SEQ ID NO: 81185 - DNA, 40 bp, Homo sapiens
tttcaaaataaatctggagcatgaacaatgaaaattagct

SEQ ID NO: 81186 - DNA, 40 bp, Homo sapiens
gctaattttcattgttcatgctccagatttattttgaaat

SEQ ID NO: 81187 - DNA, 40 bp, Homo sapiens
atttcaaaataaatctggagcatgaacaatgaaaattagc

SEQ ID NO: 81188 - DNA, 40 bp, Homo sapiens
ctaattttcattgttcatgctccagatttattttgaaata

SEQ ID NO: 81189 - DNA, 40 bp, Homo sapiens
tatttcaaaataaatctggagcatgaacaatgaaaattag

SEQ ID NO: 81190 - DNA, 40 bp, Homo sapiens
taattttcattgttcatgctccagatttattttgaaatat

SEQ ID NO: 81191 - DNA, 40 bp, Homo sapiens
atatttcaaaataaatctggagcatgaacaatgaaaatta

SEQ ID NO: 81192 - DNA, 40 bp, Homo sapiens
aattttcattgttcatgctccagatttattttgaaatatc

SEQ ID NO: 81193 - DNA, 40 bp, Homo sapiens
gatatttcaaaataaatctggagcatgaacaatgaaaatt

SEQ ID NO: 81194 - DNA, 40 bp, Homo sapiens
attttcattgttcatgctccagatttattttgaaatatcg

SEQ ID NO: 81195 - DNA, 40 bp, Homo sapiens
cgatatttcaaaataaatctggagcatgaacaatgaaaat

SEQ ID NO: 81196 - DNA, 40 bp, Homo sapiens
ttttcattgttcatgctccagatttattttgaaatatcgt

SEQ ID NO: 81197 - DNA, 40 bp, Homo sapiens
acgatatttcaaaataaatctggagcatgaacaatgaaaa

SEQ ID NO: 81198 - DNA, 40 bp, Homo sapiens
tttcattgttcatgctccagatttattttgaaatatcgtt

SEQ ID NO: 81199 - DNA, 40 bp, Homo sapiens
aacgatatttcaaaataaatctggagcatgaacaatgaaa

SEQ ID NO: 81200 - DNA, 40 bp, Homo sapiens
ttcattgttcatgctccagatttattttgaaatatcgtta

SEQ ID NO: 81201 - DNA, 40 bp, Homo sapiens
taacgatatttcaaaataaatctggagcatgaacaatgaa

SEQ ID NO: 81202 - DNA, 40 bp, Homo sapiens
tcattgttcatgctccagatttattttgaaatatcgttaa

SEQ ID NO: 81203 - DNA, 40 bp, Homo sapiens
ttaacgatatttcaaaataaatctggagcatgaacaatga

SEQ ID NO: 81204 - DNA, 40 bp, Homo sapiens
cattgttcatgctccagatttattttgaaatatcgttaat

SEQ ID NO: 81205 - DNA, 40 bp, Homo sapiens
attaacgatatttcaaaataaatctggagcatgaacaatg

SEQ ID NO: 81206 - DNA, 40 bp, Homo sapiens
attgttcatgctccagatttattttgaaatatcgttaatc

SEQ ID NO: 81207 - DNA, 40 bp, Homo sapiens
gattaacgatatttcaaaataaatctggagcatgaacaat

SEQ ID NO: 81208 - DNA, 40 bp, Homo sapiens
ttgttcatgctccagatttattttgaaatatcgttaatct

SEQ ID NO: 81209 - DNA, 40 bp, Homo sapiens
agattaacgatatttcaaaataaatctggagcatgaacaa

SEQ ID NO: 81210 - DNA, 40 bp, Homo sapiens
tgttcatgctccagatttattttgaaatatcgttaatctt

SEQ ID NO: 81211 - DNA, 40 bp, Homo sapiens
aagattaacgatatttcaaaataaatctggagcatgaaca

SEQ ID NO: 81212 - DNA, 40 bp, Homo sapiens
gttcatgctccagatttattttgaaatatcgttaatctta

SEQ ID NO: 81213 - DNA, 40 bp, Homo sapiens
taagattaacgatatttcaaaataaatctggagcatgaac

SEQ ID NO: 81214 - DNA, 40 bp, Homo sapiens
ttcatgctccagatttattttgaaatatcgttaatcttag

SEQ ID NO: 81215 - DNA, 40 bp, Homo sapiens
ctaagattaacgatatttcaaaataaatctggagcatgaa

SEQ ID NO: 81216 - DNA, 40 bp, Homo sapiens
tcatgctccagatttattttgaaatatcgttaatcttagt

SEQ ID NO: 81217 - DNA, 40 bp, Homo sapiens
actaagattaacgatatttcaaaataaatctggagcatga

SEQ ID NO: 81218 - DNA, 40 bp, Homo sapiens
catgctccagatttattttgaaatatcgttaatcttagta

SEQ ID NO: 81219 - DNA, 40 bp, Homo sapiens
tactaagattaacgatatttcaaaataaatctggagcatg

SEQ ID NO: 81220 - DNA, 40 bp, Homo sapiens
atgctccagatttattttgaaatatcgttaatcttagtag

SEQ ID NO: 81221 - DNA, 40 bp, Homo sapiens
ctactaagattaacgatatttcaaaataaatctggagcat

SEQ ID NO: 81222 - DNA, 40 bp, Homo sapiens
tgctccagatttattttgaaatatcgttaatcttagtagt

SEQ ID NO: 81223 - DNA, 40 bp, Homo sapiens
actactaagattaacgatatttcaaaataaatctggagca

SEQ ID NO: 81224 - DNA, 40 bp, Homo sapiens
gctccagatttattttgaaatatcgttaatcttagtagta

SEQ ID NO: 81225 - DNA, 40 bp, Homo sapiens
tactactaagattaacgatatttcaaaataaatctggagc

SEQ ID NO: 81226 - DNA, 40 bp, Homo sapiens
ctccagatttattttgaaatatcgttaatcttagtagtac

SEQ ID NO: 81227 - DNA, 40 bp, Homo sapiens
gtactactaagattaacgatatttcaaaataaatctggag

SEQ ID NO: 81228 - DNA, 40 bp, Homo sapiens
tccagatttattttgaaatatcgttaatcttagtagtaca

SEQ ID NO: 81229 - DNA, 40 bp, Homo sapiens
tgtactactaagattaacgatatttcaaaataaatctgga

SEQ ID NO: 81230 - DNA, 40 bp, Homo sapiens
ccagatttattttgaaatatcgttaatcttagtagtacag

SEQ ID NO: 81231 - DNA, 40 bp, Homo sapiens
ctgtactactaagattaacgatatttcaaaataaatctgg

SEQ ID NO: 81232 - DNA, 40 bp, Homo sapiens
cagatttattttgaaatatcgttaatcttagtagtacagt

SEQ ID NO: 81233 - DNA, 40 bp, Homo sapiens
actgtactactaagattaacgatatttcaaaataaatctg

SEQ ID NO: 81234 - DNA, 40 bp, Homo sapiens
agatttattttgaaatatcgttaatcttagtagtacagta

SEQ ID NO: 81235 - DNA, 40 bp, Homo sapiens
tactgtactactaagattaacgatatttcaaaataaatct

SEQ ID NO: 81236 - DNA, 40 bp, Homo sapiens
gatttattttgaaatatcgttaatcttagtagtacagtaa

SEQ ID NO: 81237 - DNA, 40 bp, Homo sapiens
ttactgtactactaagattaacgatatttcaaaataaatc

SEQ ID NO: 81238 - DNA, 40 bp, Homo sapiens
atttattttgaaatatcgttaatcttagtagtacagtaaa

SEQ ID NO: 81239 - DNA, 40 bp, Homo sapiens
tttactgtactactaagattaacgatatttcaaaataaat

SEQ ID NO: 81240 - DNA, 40 bp, Homo sapiens
tttattttgaaatatcgttaatcttagtagtacagtaaag

SEQ ID NO: 81241 - DNA, 40 bp, Homo sapiens
ctttactgtactactaagattaacgatatttcaaaataaa

SEQ ID NO: 81242 - DNA, 40 bp, Homo sapiens
ttattttgaaatatcgttaatcttagtagtacagtaaagg

SEQ ID NO: 81243 - DNA, 40 bp, Homo sapiens
cctttactgtactactaagattaacgatatttcaaaataa

SEQ ID NO: 81244 - DNA, 40 bp, Homo sapiens
tattttgaaatatcgttaatcttagtagtacagtaaagga

SEQ ID NO: 81245 - DNA, 40 bp, Homo sapiens
tcctttactgtactactaagattaacgatatttcaaaata

SEQ ID NO: 81246 - DNA, 40 bp, Homo sapiens
attttgaaatatcgttaatcttagtagtacagtaaaggag

SEQ ID NO: 81247 - DNA, 40 bp, Homo sapiens
ctcctttactgtactactaagattaacgatatttcaaaat

SEQ ID NO: 81248 - DNA, 40 bp, Homo sapiens
ttttgaaatatcgttaatcttagtagtacagtaaaggaga

SEQ ID NO: 81249 - DNA, 40 bp, Homo sapiens
tctcctttactgtactactaagattaacgatatttcaaaa

SEQ ID NO: 81250 - DNA, 40 bp, Homo sapiens
tttgaaatatcgttaatcttagtagtacagtaaaggagaa

SEQ ID NO: 81251 - DNA, 40 bp, Homo sapiens
ttctcctttactgtactactaagattaacgatatttcaaa

SEQ ID NO: 81252 - DNA, 40 bp, Homo sapiens
ttgaaatatcgttaatcttagtagtacagtaaaggagaaa

SEQ ID NO: 81253 - DNA, 40 bp, Homo sapiens
tttctcctttactgtactactaagattaacgatatttcaa

SEQ ID NO: 81254 - DNA, 40 bp, Homo sapiens
tgaaatatcgttaatcttagtagtacagtaaaggagaaat

SEQ ID NO: 81255 - DNA, 40 bp, Homo sapiens
atttctcctttactgtactactaagattaacgatatttca

SEQ ID NO: 81256 - DNA, 40 bp, Homo sapiens
gaaatatcgttaatcttagtagtacagtaaaggagaaata

SEQ ID NO: 81257 - DNA, 40 bp, Homo sapiens
tatttctcctttactgtactactaagattaacgatatttc

SEQ ID NO: 81258 - DNA, 40 bp, Homo sapiens
aaatatcgttaatcttagtagtacagtaaaggagaaatac

SEQ ID NO: 81259 - DNA, 40 bp, Homo sapiens
gtatttctcctttactgtactactaagattaacgatattt

SEQ ID NO: 81260 - DNA, 40 bp, Homo sapiens
aatatcgttaatcttagtagtacagtaaaggagaaatacc

SEQ ID NO: 81261 - DNA, 40 bp, Homo sapiens
ggtatttctcctttactgtactactaagattaacgatatt

SEQ ID NO: 81262 - DNA, 40 bp, Homo sapiens
atatcgttaatcttagtagtacagtaaaggagaaatacca

SEQ ID NO: 81263 - DNA, 40 bp, Homo sapiens
tggtatttctcctttactgtactactaagattaacgatat

SEQ ID NO: 81264 - DNA, 40 bp, Homo sapiens
tatcgttaatcttagtagtacagtaaaggagaaataccac

SEQ ID NO: 81265 - DNA, 40 bp, Homo sapiens
gtggtatttctcctttactgtactactaagattaacgata

SEQ ID NO: 81266 - DNA, 40 bp, Homo sapiens
atcgttaatcttagtagtacagtaaaggagaaataccact

SEQ ID NO: 81267 - DNA, 40 bp, Homo sapiens
agtggtatttctcctttactgtactactaagattaacgat

SEQ ID NO: 81268 - DNA, 40 bp, Homo sapiens
tcgttaatcttagtagtacagtaaaggagaaataccactt

SEQ ID NO: 81269 - DNA, 40 bp, Homo sapiens
aagtggtatttctcctttactgtactactaagattaacga

SEQ ID NO: 81270 - DNA, 40 bp, Homo sapiens
cgttaatcttagtagtacagtaaaggagaaataccactta

SEQ ID NO: 81271 - DNA, 40 bp, Homo sapiens
taagtggtatttctcctttactgtactactaagattaacg

SEQ ID NO: 81272 - DNA, 40 bp, Homo sapiens
gttaatcttagtagtacagtaaaggagaaataccacttaa

SEQ ID NO: 81273 - DNA, 40 bp, Homo sapiens
ttaagtggtatttctcctttactgtactactaagattaac

SEQ ID NO: 81274 - DNA, 40 bp, Homo sapiens
ttaatcttagtagtacagtaaaggagaaataccacttaac

SEQ ID NO: 81275 - DNA, 40 bp, Homo sapiens
gttaagtggtatttctcctttactgtactactaagattaa

SEQ ID NO: 81276 - DNA, 40 bp, Homo sapiens
taatcttagtagtacagtaaaggagaaataccacttaaca

SEQ ID NO: 81277 - DNA, 40 bp, Homo sapiens
tgttaagtggtatttctcctttactgtactactaagatta

SEQ ID NO: 81278 - DNA, 40 bp, Homo sapiens
aatcttagtagtacagtaaaggagaaataccacttaacat

SEQ ID NO: 81279 - DNA, 40 bp, Homo sapiens
atgttaagtggtatttctcctttactgtactactaagatt

SEQ ID NO: 81280 - DNA, 40 bp, Homo sapiens
atcttagtagtacagtaaaggagaaataccacttaacatt

SEQ ID NO: 81281 - DNA, 40 bp, Homo sapiens
aatgttaagtggtatttctcctttactgtactactaagat

SEQ ID NO: 81282 - DNA, 40 bp, Homo sapiens
tcttagtagtacagtaaaggagaaataccacttaacattt

SEQ ID NO: 81283 - DNA, 40 bp, Homo sapiens
aaatgttaagtggtatttctcctttactgtactactaaga

SEQ ID NO: 81284 - DNA, 40 bp, Homo sapiens
cttagtagtacagtaaaggagaaataccacttaacatttt

SEQ ID NO: 81285 - DNA, 40 bp, Homo sapiens
aaaatgttaagtggtatttctcctttactgtactactaag

SEQ ID NO: 81286 - DNA, 40 bp, Homo sapiens
ttagtagtacagtaaaggagaaataccacttaacattttt

SEQ ID NO: 81287 - DNA, 40 bp, Homo sapiens
aaaaatgttaagtggtatttctcctttactgtactactaa

SEQ ID NO: 81288 - DNA, 40 bp, Homo sapiens
tagtagtacagtaaaggagaaataccacttaacatttttt

SEQ ID NO: 81289 - DNA, 40 bp, Homo sapiens
aaaaaatgttaagtggtatttctcctttactgtactacta

SEQ ID NO: 81290 - DNA, 40 bp, Homo sapiens
agtagtacagtaaaggagaaataccacttaacattttttg

SEQ ID NO: 81291 - DNA, 40 bp, Homo sapiens
caaaaaatgttaagtggtatttctcctttactgtactact

SEQ ID NO: 81292 - DNA, 40 bp, Homo sapiens
gtagtacagtaaaggagaaataccacttaacattttttgt

SEQ ID NO: 81293 - DNA, 40 bp, Homo sapiens
acaaaaaatgttaagtggtatttctcctttactgtactac

SEQ ID NO: 81294 - DNA, 40 bp, Homo sapiens
tagtacagtaaaggagaaataccacttaacattttttgtt

SEQ ID NO: 81295 - DNA, 40 bp, Homo sapiens
aacaaaaaatgttaagtggtatttctcctttactgtacta

SEQ ID NO: 81296 - DNA, 40 bp, Homo sapiens
agtacagtaaaggagaaataccacttaacattttttgttt

SEQ ID NO: 81297 - DNA, 40 bp, Homo sapiens
aaacaaaaaatgttaagtggtatttctcctttactgtact

SEQ ID NO: 81298 - DNA, 40 bp, Homo sapiens
gtacagtaaaggagaaataccacttaacattttttgtttt

SEQ ID NO: 81299 - DNA, 40 bp, Homo sapiens
aaaacaaaaaatgttaagtggtatttctcctttactgtac

SEQ ID NO: 81300 - DNA, 40 bp, Homo sapiens
tacagtaaaggagaaataccacttaacattttttgttttt

SEQ ID NO: 81301 - DNA, 40 bp, Homo sapiens
aaaaacaaaaaatgttaagtggtatttctcctttactgta

SEQ ID NO: 81302 - DNA, 40 bp, Homo sapiens
acagtaaaggagaaataccacttaacattttttgtttttt

SEQ ID NO: 81303 - DNA, 40 bp, Homo sapiens
aaaaaacaaaaaatgttaagtggtatttctcctttactgt

SEQ ID NO: 81304 - DNA, 40 bp, Homo sapiens
cagtaaaggagaaataccacttaacattttttgttttttt

SEQ ID NO: 81305 - DNA, 40 bp, Homo sapiens
aaaaaaacaaaaaatgttaagtggtatttctcctttactg

SEQ ID NO: 81306 - DNA, 40 bp, Homo sapiens
agtaaaggagaaataccacttaacattttttgtttttttt

SEQ ID NO: 81307 - DNA, 40 bp, Homo sapiens
aaaaaaaacaaaaaatgttaagtggtatttctcctttact

SEQ ID NO: 81308 - DNA, 40 bp, Homo sapiens
gtaaaggagaaataccacttaacattttttgttttttttt

SEQ ID NO: 81309 - DNA, 40 bp, Homo sapiens
aaaaaaaaacaaaaaatgttaagtggtatttctcctttac

SEQ ID NO: 81310 - DNA, 40 bp, Homo sapiens
taaaggagaaataccacttaacattttttgtttttttttc

SEQ ID NO: 81311 - DNA, 40 bp, Homo sapiens
gaaaaaaaaacaaaaaatgttaagtggtatttctccttta

SEQ ID NO: 81312 - DNA, 40 bp, Homo sapiens
aaaggagaaataccacttaacattttttgtttttttttct

SEQ ID NO: 81313 - DNA, 40 bp, Homo sapiens
agaaaaaaaaacaaaaaatgttaagtggtatttctccttt

SEQ ID NO: 81314 - DNA, 40 bp, Homo sapiens
aaggagaaataccacttaacattttttgtttttttttctt

SEQ ID NO: 81315 - DNA, 40 bp, Homo sapiens
aagaaaaaaaaacaaaaaatgttaagtggtatttctcctt

SEQ ID NO: 81316 - DNA, 40 bp, Homo sapiens
aggagaaataccacttaacattttttgtttttttttcttt

SEQ ID NO: 81317 - DNA, 40 bp, Homo sapiens
aaagaaaaaaaaacaaaaaatgttaagtggtatttctcct

SEQ ID NO: 81318 - DNA, 40 bp, Homo sapiens
ggagaaataccacttaacattttttgtttttttttctttg

SEQ ID NO: 81319 - DNA, 40 bp, Homo sapiens
caaagaaaaaaaaacaaaaaatgttaagtggtatttctcc

SEQ ID NO: 81320 - DNA, 40 bp, Homo sapiens
gagaaataccacttaacattttttgtttttttttctttga

SEQ ID NO: 81321 - DNA, 40 bp, Homo sapiens
tcaaagaaaaaaaaacaaaaaatgttaagtggtatttctc

SEQ ID NO: 81322 - DNA, 40 bp, Homo sapiens
agaaataccacttaacattttttgtttttttttctttgag

SEQ ID NO: 81323 - DNA, 40 bp, Homo sapiens
ctcaaagaaaaaaaaacaaaaaatgttaagtggtatttct

SEQ ID NO: 81324 - DNA, 40 bp, Homo sapiens
gaaataccacttaacattttttgtttttttttctttgaga

SEQ ID NO: 81325 - DNA, 40 bp, Homo sapiens
tctcaaagaaaaaaaaacaaaaaatgttaagtggtatttc

SEQ ID NO: 81326 - DNA, 40 bp, Homo sapiens
aaataccacttaacattttttgtttttttttctttgagac

SEQ ID NO: 81327 - DNA, 40 bp, Homo sapiens
gtctcaaagaaaaaaaaacaaaaaatgttaagtggtattt

SEQ ID NO: 81328 - DNA, 40 bp, Homo sapiens
aataccacttaacattttttgtttttttttctttgagaca

SEQ ID NO: 81329 - DNA, 40 bp, Homo sapiens
tgtctcaaagaaaaaaaaacaaaaaatgttaagtggtatt

SEQ ID NO: 81330 - DNA, 40 bp, Homo sapiens
ataccacttaacattttttgtttttttttctttgagacag

SEQ ID NO: 81331 - DNA, 40 bp, Homo sapiens
ctgtctcaaagaaaaaaaaacaaaaaatgttaagtggtat

SEQ ID NO: 81332 - DNA, 40 bp, Homo sapiens
taccacttaacattttttgtttttttttctttgagacaga

SEQ ID NO: 81333 - DNA, 40 bp, Homo sapiens
tctgtctcaaagaaaaaaaaacaaaaaatgttaagtggta

SEQ ID NO: 81334 - DNA, 40 bp, Homo sapiens
accacttaacattttttgtttttttttctttgagacagag

SEQ ID NO: 81335 - DNA, 40 bp, Homo sapiens
ctctgtctcaaagaaaaaaaaacaaaaaatgttaagtggt

SEQ ID NO: 81336 - DNA, 40 bp, Homo sapiens
ccacttaacattttttgtttttttttctttgagacagagt

SEQ ID NO: 81337 - DNA, 40 bp, Homo sapiens
actctgtctcaaagaaaaaaaaacaaaaaatgttaagtgg

SEQ ID NO: 81338 - DNA, 40 bp, Homo sapiens
cacttaacattttttgtttttttttctttgagacagagtc

SEQ ID NO: 81339 - DNA, 40 bp, Homo sapiens
gactctgtctcaaagaaaaaaaaacaaaaaatgttaagtg

SEQ ID NO: 81340 - DNA, 40 bp, Homo sapiens
acttaacattttttgtttttttttctttgagacagagtca

SEQ ID NO: 81341 - DNA, 40 bp, Homo sapiens
tgactctgtctcaaagaaaaaaaaacaaaaaatgttaagt

SEQ ID NO: 81342 - DNA, 40 bp, Homo sapiens
cttaacattttttgtttttttttctttgagacagagtcat

SEQ ID NO: 81343 - DNA, 40 bp, Homo sapiens
atgactctgtctcaaagaaaaaaaaacaaaaaatgttaag

SEQ ID NO: 81344 - DNA, 40 bp, Homo sapiens
ttaacattttttgtttttttttctttgagacagagtcatg

SEQ ID NO: 81345 - DNA, 40 bp, Homo sapiens
catgactctgtctcaaagaaaaaaaaacaaaaaatgttaa

SEQ ID NO: 81346 - DNA, 40 bp, Homo sapiens
taacattttttgtttttttttctttgagacagagtcatgc

SEQ ID NO: 81347 - DNA, 40 bp, Homo sapiens
gcatgactctgtctcaaagaaaaaaaaacaaaaaatgtta

SEQ ID NO: 81348 - DNA, 40 bp, Homo sapiens
aacattttttgtttttttttctttgagacagagtcatgct

SEQ ID NO: 81349 - DNA, 40 bp, Homo sapiens
agcatgactctgtctcaaagaaaaaaaaacaaaaaatgtt

SEQ ID NO: 81350 - DNA, 40 bp, Homo sapiens
acattttttgtttttttttctttgagacagagtcatgctc

SEQ ID NO: 81351 - DNA, 40 bp, Homo sapiens
gagcatgactctgtctcaaagaaaaaaaaacaaaaaatgt

SEQ ID NO: 81352 - DNA, 40 bp, Homo sapiens
cattttttgtttttttttctttgagacagagtcatgctct

SEQ ID NO: 81353 - DNA, 40 bp, Homo sapiens
agagcatgactctgtctcaaagaaaaaaaaacaaaaaatg

SEQ ID NO: 81354 - DNA, 40 bp, Homo sapiens
attttttgtttttttttctttgagacagagtcatgctctg

SEQ ID NO: 81355 - DNA, 40 bp, Homo sapiens
cagagcatgactctgtctcaaagaaaaaaaaacaaaaaat

SEQ ID NO: 81356 - DNA, 40 bp, Homo sapiens
ttttttgtttttttttctttgagacagagtcatgctctgt

SEQ ID NO: 81357 - DNA, 40 bp, Homo sapiens
acagagcatgactctgtctcaaagaaaaaaaaacaaaaaa

SEQ ID NO: 81358 - DNA, 40 bp, Homo sapiens
tttttgtttttttttctttgagacagagtcatgctctgtc

SEQ ID NO: 81359 - DNA, 40 bp, Homo sapiens
gacagagcatgactctgtctcaaagaaaaaaaaacaaaaa

SEQ ID NO: 81360 - DNA, 40 bp, Homo sapiens
ttttgtttttttttctttgagacagagtcatgctctgtca

SEQ ID NO: 81361 - DNA, 40 bp, Homo sapiens
tgacagagcatgactctgtctcaaagaaaaaaaaacaaaa

SEQ ID NO: 81362 - DNA, 40 bp, Homo sapiens
tttgtttttttttctttgagacagagtcatgctctgtcac

SEQ ID NO: 81363 - DNA, 40 bp, Homo sapiens
gtgacagagcatgactctgtctcaaagaaaaaaaaacaaa

SEQ ID NO: 81364 - DNA, 40 bp, Homo sapiens
ttgtttttttttctttgagacagagtcatgctctgtcacc

SEQ ID NO: 81365 - DNA, 40 bp, Homo sapiens
ggtgacagagcatgactctgtctcaaagaaaaaaaaacaa

SEQ ID NO: 81366 - DNA, 40 bp, Homo sapiens
tgtttttttttctttgagacagagtcatgctctgtcaccc

SEQ ID NO: 81367 - DNA, 40 bp, Homo sapiens
gggtgacagagcatgactctgtctcaaagaaaaaaaaaca

SEQ ID NO: 81368 - DNA, 40 bp, Homo sapiens
gtttttttttctttgagacagagtcatgctctgtcaccca

SEQ ID NO: 81369 - DNA, 40 bp, Homo sapiens
tgggtgacagagcatgactctgtctcaaagaaaaaaaaac

SEQ ID NO: 81370 - DNA, 40 bp, Homo sapiens
tttttttttctttgagacagagtcatgctctgtcacccag

SEQ ID NO: 81371 - DNA, 40 bp, Homo sapiens
ctgggtgacagagcatgactctgtctcaaagaaaaaaaaa

SEQ ID NO: 81372 - DNA, 40 bp, Homo sapiens
ttttttttctttgagacagagtcatgctctgtcacccagt

SEQ ID NO: 81373 - DNA, 40 bp, Homo sapiens
actgggtgacagagcatgactctgtctcaaagaaaaaaaa

SEQ ID NO: 81374 - DNA, 40 bp, Homo sapiens
tttttttctttgagacagagtcatgctctgtcacccagtc

SEQ ID NO: 81375 - DNA, 40 bp, Homo sapiens
gactgggtgacagagcatgactctgtctcaaagaaaaaaa

SEQ ID NO: 81376 - DNA, 40 bp, Homo sapiens
ttttttctttgagacagagtcatgctctgtcacccagtct

SEQ ID NO: 81377 - DNA, 40 bp, Homo sapiens
agactgggtgacagagcatgactctgtctcaaagaaaaaa

SEQ ID NO: 81378 - DNA, 40 bp, Homo sapiens
tttttctttgagacagagtcatgctctgtcacccagtctg

SEQ ID NO: 81379 - DNA, 40 bp, Homo sapiens
cagactgggtgacagagcatgactctgtctcaaagaaaaa

SEQ ID NO: 81380 - DNA, 40 bp, Homo sapiens
ttttctttgagacagagtcatgctctgtcacccagtctgg

SEQ ID NO: 81381 - DNA, 40 bp, Homo sapiens
ccagactgggtgacagagcatgactctgtctcaaagaaaa

SEQ ID NO: 81382 - DNA, 40 bp, Homo sapiens
tttctttgagacagagtcatgctctgtcacccagtctgga

SEQ ID NO: 81383 - DNA, 40 bp, Homo sapiens
tccagactgggtgacagagcatgactctgtctcaaagaaa

SEQ ID NO: 81384 - DNA, 40 bp, Homo sapiens
ttctttgagacagagtcatgctctgtcacccagtctggag

SEQ ID NO: 81385 - DNA, 40 bp, Homo sapiens
ctccagactgggtgacagagcatgactctgtctcaaagaa

SEQ ID NO: 81386 - DNA, 40 bp, Homo sapiens
tctttgagacagagtcatgctctgtcacccagtctggagt

SEQ ID NO: 81387 - DNA, 40 bp, Homo sapiens
actccagactgggtgacagagcatgactctgtctcaaaga

SEQ ID NO: 81388 - DNA, 40 bp, Homo sapiens
ctttgagacagagtcatgctctgtcacccagtctggagtg

SEQ ID NO: 81389 - DNA, 40 bp, Homo sapiens
cactccagactgggtgacagagcatgactctgtctcaaag

SEQ ID NO: 81390 - DNA, 40 bp, Homo sapiens
tttgagacagagtcatgctctgtcacccagtctggagtgc

SEQ ID NO: 81391 - DNA, 40 bp, Homo sapiens
gcactccagactgggtgacagagcatgactctgtctcaaa

SEQ ID NO: 81392 - DNA, 40 bp, Homo sapiens
ttgagacagagtcatgctctgtcacccagtctggagtgca

SEQ ID NO: 81393 - DNA, 40 bp, Homo sapiens
tgcactccagactgggtgacagagcatgactctgtctcaa

SEQ ID NO: 81394 - DNA, 40 bp, Homo sapiens
tgagacagagtcatgctctgtcacccagtctggagtgcag

SEQ ID NO: 81395 - DNA, 40 bp, Homo sapiens
ctgcactccagactgggtgacagagcatgactctgtctca

SEQ ID NO: 81396 - DNA, 40 bp, Homo sapiens
gagacagagtcatgctctgtcacccagtctggagtgcagt

SEQ ID NO: 81397 - DNA, 40 bp, Homo sapiens
actgcactccagactgggtgacagagcatgactctgtctc

SEQ ID NO: 81398 - DNA, 40 bp, Homo sapiens
agacagagtcatgctctgtcacccagtctggagtgcagtg

SEQ ID NO: 81399 - DNA, 40 bp, Homo sapiens
cactgcactccagactgggtgacagagcatgactctgtct

SEQ ID NO: 81400 - DNA, 40 bp, Homo sapiens
gacagagtcatgctctgtcacccagtctggagtgcagtgg

SEQ ID NO: 81401 - DNA, 40 bp, Homo sapiens
ccactgcactccagactgggtgacagagcatgactctgtc

SEQ ID NO: 81402 - DNA, 40 bp, Homo sapiens
acagagtcatgctctgtcacccagtctggagtgcagtggt

SEQ ID NO: 81403 - DNA, 40 bp, Homo sapiens
accactgcactccagactgggtgacagagcatgactctgt

SEQ ID NO: 81404 - DNA, 40 bp, Homo sapiens
cagagtcatgctctgtcacccagtctggagtgcagtggtg

SEQ ID NO: 81405 - DNA, 40 bp, Homo sapiens
caccactgcactccagactgggtgacagagcatgactctg

SEQ ID NO: 81406 - DNA, 40 bp, Homo sapiens
agagtcatgctctgtcacccagtctggagtgcagtggtgc

SEQ ID NO: 81407 - DNA, 40 bp, Homo sapiens
gcaccactgcactccagactgggtgacagagcatgactct

SEQ ID NO: 81408 - DNA, 40 bp, Homo sapiens
gagtcatgctctgtcacccagtctggagtgcagtggtgct

SEQ ID NO: 81409 - DNA, 40 bp, Homo sapiens
agcaccactgcactccagactgggtgacagagcatgactc

SEQ ID NO: 81410 - DNA, 40 bp, Homo sapiens
agtcatgctctgtcacccagtctggagtgcagtggtgcta

SEQ ID NO: 81411 - DNA, 40 bp, Homo sapiens
tagcaccactgcactccagactgggtgacagagcatgact

SEQ ID NO: 81412 - DNA, 40 bp, Homo sapiens
gtcatgctctgtcacccagtctggagtgcagtggtgctat

SEQ ID NO: 81413 - DNA, 40 bp, Homo sapiens
atagcaccactgcactccagactgggtgacagagcatgac

SEQ ID NO: 81414 - DNA, 40 bp, Homo sapiens
tcatgctctgtcacccagtctggagtgcagtggtgctatc

SEQ ID NO: 81415 - DNA, 40 bp, Homo sapiens
gatagcaccactgcactccagactgggtgacagagcatga

SEQ ID NO: 81416 - DNA, 40 bp, Homo sapiens
catgctctgtcacccagtctggagtgcagtggtgctatct

SEQ ID NO: 81417 - DNA, 40 bp, Homo sapiens
agatagcaccactgcactccagactgggtgacagagcatg

SEQ ID NO: 81418 - DNA, 40 bp, Homo sapiens
atgctctgtcacccagtctggagtgcagtggtgctatctc

SEQ ID NO: 81419 - DNA, 40 bp, Homo sapiens
gagatagcaccactgcactccagactgggtgacagagcat

SEQ ID NO: 81420 - DNA, 40 bp, Homo sapiens
tgctctgtcacccagtctggagtgcagtggtgctatctcg

SEQ ID NO: 81421 - DNA, 40 bp, Homo sapiens
cgagatagcaccactgcactccagactgggtgacagagca

SEQ ID NO: 81422 - DNA, 40 bp, Homo sapiens
gctctgtcacccagtctggagtgcagtggtgctatctcgg

SEQ ID NO: 81423 - DNA, 40 bp, Homo sapiens
ccgagatagcaccactgcactccagactgggtgacagagc

SEQ ID NO: 81424 - DNA, 40 bp, Homo sapiens
ctctgtcacccagtctggagtgcagtggtgctatctcggc

SEQ ID NO: 81425 - DNA, 40 bp, Homo sapiens
gccgagatagcaccactgcactccagactgggtgacagag

SEQ ID NO: 81426 - DNA, 40 bp, Homo sapiens
tctgtcacccagtctggagtgcagtggtgctatctcggct

SEQ ID NO: 81427 - DNA, 40 bp, Homo sapiens
agccgagatagcaccactgcactccagactgggtgacaga

SEQ ID NO: 81428 - DNA, 40 bp, Homo sapiens
ctgtcacccagtctggagtgcagtggtgctatctcggctc

SEQ ID NO: 81429 - DNA, 40 bp, Homo sapiens
gagccgagatagcaccactgcactccagactgggtgacag

SEQ ID NO: 81430 - DNA, 40 bp, Homo sapiens
tgtcacccagtctggagtgcagtggtgctatctcggctca

SEQ ID NO: 81431 - DNA, 40 bp, Homo sapiens
tgagccgagatagcaccactgcactccagactgggtgaca

SEQ ID NO: 81432 - DNA, 40 bp, Homo sapiens
gtcacccagtctggagtgcagtggtgctatctcggctcac

SEQ ID NO: 81433 - DNA, 40 bp, Homo sapiens
gtgagccgagatagcaccactgcactccagactgggtgac

SEQ ID NO: 81434 - DNA, 40 bp, Homo sapiens
tcacccagtctggagtgcagtggtgctatctcggctcact

SEQ ID NO: 81435 - DNA, 40 bp, Homo sapiens
agtgagccgagatagcaccactgcactccagactgggtga

SEQ ID NO: 81436 - DNA, 40 bp, Homo sapiens
cacccagtctggagtgcagtggtgctatctcggctcactg

SEQ ID NO: 81437 - DNA, 40 bp, Homo sapiens
cagtgagccgagatagcaccactgcactccagactgggtg

SEQ ID NO: 81438 - DNA, 40 bp, Homo sapiens
acccagtctggagtgcagtggtgctatctcggctcactgc

SEQ ID NO: 81439 - DNA, 40 bp, Homo sapiens
gcagtgagccgagatagcaccactgcactccagactgggt

SEQ ID NO: 81440 - DNA, 40 bp, Homo sapiens
cccagtctggagtgcagtggtgctatctcggctcactgca

SEQ ID NO: 81441 - DNA, 40 bp, Homo sapiens
tgcagtgagccgagatagcaccactgcactccagactggg

SEQ ID NO: 81442 - DNA, 40 bp, Homo sapiens
ccagtctggagtgcagtggtgctatctcggctcactgcaa

SEQ ID NO: 81443 - DNA, 40 bp, Homo sapiens
ttgcagtgagccgagatagcaccactgcactccagactgg

SEQ ID NO: 81444 - DNA, 40 bp, Homo sapiens
cagtctggagtgcagtggtgctatctcggctcactgcaat

SEQ ID NO: 81445 - DNA, 40 bp, Homo sapiens
attgcagtgagccgagatagcaccactgcactccagactg

SEQ ID NO: 81446 - DNA, 40 bp, Homo sapiens
agtctggagtgcagtggtgctatctcggctcactgcaatg

SEQ ID NO: 81447 - DNA, 40 bp, Homo sapiens
cattgcagtgagccgagatagcaccactgcactccagact

SEQ ID NO: 81448 - DNA, 40 bp, Homo sapiens
gtctggagtgcagtggtgctatctcggctcactgcaatgc

SEQ ID NO: 81449 - DNA, 40 bp, Homo sapiens
gcattgcagtgagccgagatagcaccactgcactccagac

SEQ ID NO: 81450 - DNA, 40 bp, Homo sapiens
tctggagtgcagtggtgctatctcggctcactgcaatgca

SEQ ID NO: 81451 - DNA, 40 bp, Homo sapiens
tgcattgcagtgagccgagatagcaccactgcactccaga

SEQ ID NO: 81452 - DNA, 40 bp, Homo sapiens
ctggagtgcagtggtgctatctcggctcactgcaatgcac

SEQ ID NO: 81453 - DNA, 40 bp, Homo sapiens
gtgcattgcagtgagccgagatagcaccactgcactccag

SEQ ID NO: 81454 - DNA, 40 bp, Homo sapiens
tggagtgcagtggtgctatctcggctcactgcaatgcact

SEQ ID NO: 81455 - DNA, 40 bp, Homo sapiens
agtgcattgcagtgagccgagatagcaccactgcactcca

SEQ ID NO: 81456 - DNA, 40 bp, Homo sapiens
ggagtgcagtggtgctatctcggctcactgcaatgcactt

SEQ ID NO: 81457 - DNA, 40 bp, Homo sapiens
aagtgcattgcagtgagccgagatagcaccactgcactcc

SEQ ID NO: 81458 - DNA, 40 bp, Homo sapiens
gagtgcagtggtgctatctcggctcactgcaatgcacttc

SEQ ID NO: 81459 - DNA, 40 bp, Homo sapiens
gaagtgcattgcagtgagccgagatagcaccactgcactc

SEQ ID NO: 81460 - DNA, 40 bp, Homo sapiens
agtgcagtggtgctatctcggctcactgcaatgcacttcg

SEQ ID NO: 81461 - DNA, 40 bp, Homo sapiens
cgaagtgcattgcagtgagccgagatagcaccactgcact

SEQ ID NO: 81462 - DNA, 40 bp, Homo sapiens
gtgcagtggtgctatctcggctcactgcaatgcacttcgc

SEQ ID NO: 81463 - DNA, 40 bp, Homo sapiens
gcgaagtgcattgcagtgagccgagatagcaccactgcac

SEQ ID NO: 81464 - DNA, 40 bp, Homo sapiens
tgcagtggtgctatctcggctcactgcaatgcacttcgcc

SEQ ID NO: 81465 - DNA, 40 bp, Homo sapiens
ggcgaagtgcattgcagtgagccgagatagcaccactgca

SEQ ID NO: 81466 - DNA, 40 bp, Homo sapiens
gcagtggtgctatctcggctcactgcaatgcacttcgcct

SEQ ID NO: 81467 - DNA, 40 bp, Homo sapiens
aggcgaagtgcattgcagtgagccgagatagcaccactgc

SEQ ID NO: 81468 - DNA, 40 bp, Homo sapiens
cagtggtgctatctcggctcactgcaatgcacttcgcctc

SEQ ID NO: 81469 - DNA, 40 bp, Homo sapiens
gaggcgaagtgcattgcagtgagccgagatagcaccactg

SEQ ID NO: 81470 - DNA, 40 bp, Homo sapiens
agtggtgctatctcggctcactgcaatgcacttcgcctct

SEQ ID NO: 81471 - DNA, 40 bp, Homo sapiens
agaggcgaagtgcattgcagtgagccgagatagcaccact

SEQ ID NO: 81472 - DNA, 40 bp, Homo sapiens
gtggtgctatctcggctcactgcaatgcacttcgcctctc

SEQ ID NO: 81473 - DNA, 40 bp, Homo sapiens
gagaggcgaagtgcattgcagtgagccgagatagcaccac

SEQ ID NO: 81474 - DNA, 40 bp, Homo sapiens
tggtgctatctcggctcactgcaatgcacttcgcctctcc

SEQ ID NO: 81475 - DNA, 40 bp, Homo sapiens
ggagaggcgaagtgcattgcagtgagccgagatagcacca

SEQ ID NO: 81476 - DNA, 40 bp, Homo sapiens
ggtgctatctcggctcactgcaatgcacttcgcctctccg

SEQ ID NO: 81477 - DNA, 40 bp, Homo sapiens
cggagaggcgaagtgcattgcagtgagccgagatagcacc

SEQ ID NO: 81478 - DNA, 40 bp, Homo sapiens
gtgctatctcggctcactgcaatgcacttcgcctctccgg

SEQ ID NO: 81479 - DNA, 40 bp, Homo sapiens
ccggagaggcgaagtgcattgcagtgagccgagatagcac

SEQ ID NO: 81480 - DNA, 40 bp, Homo sapiens
tgctatctcggctcactgcaatgcacttcgcctctccggg

SEQ ID NO: 81481 - DNA, 40 bp, Homo sapiens
cccggagaggcgaagtgcattgcagtgagccgagatagca

SEQ ID NO: 81482 - DNA, 40 bp, Homo sapiens
gctatctcggctcactgcaatgcacttcgcctctccgggt

SEQ ID NO: 81483 - DNA, 40 bp, Homo sapiens
acccggagaggcgaagtgcattgcagtgagccgagatagc

SEQ ID NO: 81484 - DNA, 40 bp, Homo sapiens
ctatctcggctcactgcaatgcacttcgcctctccgggtt

SEQ ID NO: 81485 - DNA, 40 bp, Homo sapiens
aacccggagaggcgaagtgcattgcagtgagccgagatag

SEQ ID NO: 81486 - DNA, 40 bp, Homo sapiens
tatctcggctcactgcaatgcacttcgcctctccgggttc

SEQ ID NO: 81487 - DNA, 40 bp, Homo sapiens
gaacccggagaggcgaagtgcattgcagtgagccgagata

SEQ ID NO: 81488 - DNA, 40 bp, Homo sapiens
atctcggctcactgcaatgcacttcgcctctccgggttca

SEQ ID NO: 81489 - DNA, 40 bp, Homo sapiens
tgaacccggagaggcgaagtgcattgcagtgagccgagat

SEQ ID NO: 81490 - DNA, 40 bp, Homo sapiens
tctcggctcactgcaatgcacttcgcctctccgggttcag

SEQ ID NO: 81491 - DNA, 40 bp, Homo sapiens
ctgaacccggagaggcgaagtgcattgcagtgagccgaga

SEQ ID NO: 81492 - DNA, 40 bp, Homo sapiens
ctcggctcactgcaatgcacttcgcctctccgggttcagc

SEQ ID NO: 81493 - DNA, 40 bp, Homo sapiens
gctgaacccggagaggcgaagtgcattgcagtgagccgag

SEQ ID NO: 81494 - DNA, 40 bp, Homo sapiens
tcggctcactgcaatgcacttcgcctctccgggttcagca

SEQ ID NO: 81495 - DNA, 40 bp, Homo sapiens
tgctgaacccggagaggcgaagtgcattgcagtgagccga

SEQ ID NO: 81496 - DNA, 40 bp, Homo sapiens
cggctcactgcaatgcacttcgcctctccgggttcagcaa

SEQ ID NO: 81497 - DNA, 40 bp, Homo sapiens
ttgctgaacccggagaggcgaagtgcattgcagtgagccg

SEQ ID NO: 81498 - DNA, 40 bp, Homo sapiens
ggctcactgcaatgcacttcgcctctccgggttcagcaat

SEQ ID NO: 81499 - DNA, 40 bp, Homo sapiens
attgctgaacccggagaggcgaagtgcattgcagtgagcc

SEQ ID NO: 81500 - DNA, 40 bp, Homo sapiens
gctcactgcaatgcacttcgcctctccgggttcagcaatt

SEQ ID NO: 81501 - DNA, 40 bp, Homo sapiens
aattgctgaacccggagaggcgaagtgcattgcagtgagc

SEQ ID NO: 81502 - DNA, 40 bp, Homo sapiens
ctcactgcaatgcacttcgcctctccgggttcagcaattc

SEQ ID NO: 81503 - DNA, 40 bp, Homo sapiens
gaattgctgaacccggagaggcgaagtgcattgcagtgag

SEQ ID NO: 81504 - DNA, 40 bp, Homo sapiens
tcactgcaatgcacttcgcctctccgggttcagcaattct

SEQ ID NO: 81505 - DNA, 40 bp, Homo sapiens
agaattgctgaacccggagaggcgaagtgcattgcagtga

SEQ ID NO: 81506 - DNA, 40 bp, Homo sapiens
cactgcaatgcacttcgcctctccgggttcagcaattctc

SEQ ID NO: 81507 - DNA, 40 bp, Homo sapiens
gagaattgctgaacccggagaggcgaagtgcattgcagtg

SEQ ID NO: 81508 - DNA, 40 bp, Homo sapiens
actgcaatgcacttcgcctctccgggttcagcaattctcc

SEQ ID NO: 81509 - DNA, 40 bp, Homo sapiens
ggagaattgctgaacccggagaggcgaagtgcattgcagt

SEQ ID NO: 81510 - DNA, 40 bp, Homo sapiens
ctgcaatgcacttcgcctctccgggttcagcaattctcct

SEQ ID NO: 81511 - DNA, 40 bp, Homo sapiens
aggagaattgctgaacccggagaggcgaagtgcattgcag

SEQ ID NO: 81512 - DNA, 40 bp, Homo sapiens
tgcaatgcacttcgcctctccgggttcagcaattctcctg

SEQ ID NO: 81513 - DNA, 40 bp, Homo sapiens
caggagaattgctgaacccggagaggcgaagtgcattgca

SEQ ID NO: 81514 - DNA, 40 bp, Homo sapiens
gcaatgcacttcgcctctccgggttcagcaattctcctgc

SEQ ID NO: 81515 - DNA, 40 bp, Homo sapiens
gcaggagaattgctgaacccggagaggcgaagtgcattgc

SEQ ID NO: 81516 - DNA, 40 bp, Homo sapiens
caatgcacttcgcctctccgggttcagcaattctcctgcc

SEQ ID NO: 81517 - DNA, 40 bp, Homo sapiens
ggcaggagaattgctgaacccggagaggcgaagtgcattg

SEQ ID NO: 81518 - DNA, 40 bp, Homo sapiens
aatgcacttcgcctctccgggttcagcaattctcctgcct

SEQ ID NO: 81519 - DNA, 40 bp, Homo sapiens
aggcaggagaattgctgaacccggagaggcgaagtgcatt

SEQ ID NO: 81520 - DNA, 40 bp, Homo sapiens
atgcacttcgcctctccgggttcagcaattctcctgcctc

SEQ ID NO: 81521 - DNA, 40 bp, Homo sapiens
gaggcaggagaattgctgaacccggagaggcgaagtgcat

SEQ ID NO: 81522 - DNA, 40 bp, Homo sapiens
tgcacttcgcctctccgggttcagcaattctcctgcctca

SEQ ID NO: 81523 - DNA, 40 bp, Homo sapiens
tgaggcaggagaattgctgaacccggagaggcgaagtgca

SEQ ID NO: 81524 - DNA, 40 bp, Homo sapiens
gcacttcgcctctccgggttcagcaattctcctgcctcag

SEQ ID NO: 81525 - DNA, 40 bp, Homo sapiens
ctgaggcaggagaattgctgaacccggagaggcgaagtgc

SEQ ID NO: 81526 - DNA, 40 bp, Homo sapiens
cacttcgcctctccgggttcagcaattctcctgcctcagc

SEQ ID NO: 81527 - DNA, 40 bp, Homo sapiens
gctgaggcaggagaattgctgaacccggagaggcgaagtg

SEQ ID NO: 81528 - DNA, 40 bp, Homo sapiens
acttcgcctctccgggttcagcaattctcctgcctcagcc

SEQ ID NO: 81529 - DNA, 40 bp, Homo sapiens
ggctgaggcaggagaattgctgaacccggagaggcgaagt

SEQ ID NO: 81530 - DNA, 40 bp, Homo sapiens
cttcgcctctccgggttcagcaattctcctgcctcagcct

SEQ ID NO: 81531 - DNA, 40 bp, Homo sapiens
aggctgaggcaggagaattgctgaacccggagaggcgaag

SEQ ID NO: 81532 - DNA, 40 bp, Homo sapiens
ttcgcctctccgggttcagcaattctcctgcctcagcctc

SEQ ID NO: 81533 - DNA, 40 bp, Homo sapiens
gaggctgaggcaggagaattgctgaacccggagaggcgaa

SEQ ID NO: 81534 - DNA, 40 bp, Homo sapiens
tcgcctctccgggttcagcaattctcctgcctcagcctcc

SEQ ID NO: 81535 - DNA, 40 bp, Homo sapiens
ggaggctgaggcaggagaattgctgaacccggagaggcga

SEQ ID NO: 81536 - DNA, 40 bp, Homo sapiens
cgcctctccgggttcagcaattctcctgcctcagcctcct

SEQ ID NO: 81537 - DNA, 40 bp, Homo sapiens
aggaggctgaggcaggagaattgctgaacccggagaggcg

SEQ ID NO: 81538 - DNA, 40 bp, Homo sapiens
gcctctccgggttcagcaattctcctgcctcagcctcctg

SEQ ID NO: 81539 - DNA, 40 bp, Homo sapiens
caggaggctgaggcaggagaattgctgaacccggagaggc

SEQ ID NO: 81540 - DNA, 40 bp, Homo sapiens
cctctccgggttcagcaattctcctgcctcagcctcctga

SEQ ID NO: 81541 - DNA, 40 bp, Homo sapiens
tcaggaggctgaggcaggagaattgctgaacccggagagg

SEQ ID NO: 81542 - DNA, 40 bp, Homo sapiens
ctctccgggttcagcaattctcctgcctcagcctcctgag

SEQ ID NO: 81543 - DNA, 40 bp, Homo sapiens
ctcaggaggctgaggcaggagaattgctgaacccggagag

SEQ ID NO: 81544 - DNA, 40 bp, Homo sapiens
tctccgggttcagcaattctcctgcctcagcctcctgagt

SEQ ID NO: 81545 - DNA, 40 bp, Homo sapiens
actcaggaggctgaggcaggagaattgctgaacccggaga

SEQ ID NO: 81546 - DNA, 40 bp, Homo sapiens
ctccgggttcagcaattctcctgcctcagcctcctgagta

SEQ ID NO: 81547 - DNA, 40 bp, Homo sapiens
tactcaggaggctgaggcaggagaattgctgaacccggag

SEQ ID NO: 81548 - DNA, 40 bp, Homo sapiens
tccgggttcagcaattctcctgcctcagcctcctgagtag

SEQ ID NO: 81549 - DNA, 40 bp, Homo sapiens
ctactcaggaggctgaggcaggagaattgctgaacccgga

SEQ ID NO: 81550 - DNA, 40 bp, Homo sapiens
ccgggttcagcaattctcctgcctcagcctcctgagtagc

SEQ ID NO: 81551 - DNA, 40 bp, Homo sapiens
gctactcaggaggctgaggcaggagaattgctgaacccgg

SEQ ID NO: 81552 - DNA, 40 bp, Homo sapiens
cgggttcagcaattctcctgcctcagcctcctgagtagct

SEQ ID NO: 81553 - DNA, 40 bp, Homo sapiens
agctactcaggaggctgaggcaggagaattgctgaacccg

SEQ ID NO: 81554 - DNA, 40 bp, Homo sapiens
gggttcagcaattctcctgcctcagcctcctgagtagctg

SEQ ID NO: 81555 - DNA, 40 bp, Homo sapiens
cagctactcaggaggctgaggcaggagaattgctgaaccc

SEQ ID NO: 81556 - DNA, 40 bp, Homo sapiens
ggttcagcaattctcctgcctcagcctcctgagtagctgg

SEQ ID NO: 81557 - DNA, 40 bp, Homo sapiens
ccagctactcaggaggctgaggcaggagaattgctgaacc

SEQ ID NO: 81558 - DNA, 40 bp, Homo sapiens
gttcagcaattctcctgcctcagcctcctgagtagctggg

SEQ ID NO: 81559 - DNA, 40 bp, Homo sapiens
cccagctactcaggaggctgaggcaggagaattgctgaac

SEQ ID NO: 81560 - DNA, 40 bp, Homo sapiens
ttcagcaattctcctgcctcagcctcctgagtagctggga

SEQ ID NO: 81561 - DNA, 40 bp, Homo sapiens
tcccagctactcaggaggctgaggcaggagaattgctgaa

SEQ ID NO: 81562 - DNA, 40 bp, Homo sapiens
tcagcaattctcctgcctcagcctcctgagtagctgggat

SEQ ID NO: 81563 - DNA, 40 bp, Homo sapiens
atcccagctactcaggaggctgaggcaggagaattgctga

SEQ ID NO: 81564 - DNA, 40 bp, Homo sapiens
cagcaattctcctgcctcagcctcctgagtagctgggatt

SEQ ID NO: 81565 - DNA, 40 bp, Homo sapiens
aatcccagctactcaggaggctgaggcaggagaattgctg

SEQ ID NO: 81566 - DNA, 40 bp, Homo sapiens
agcaattctcctgcctcagcctcctgagtagctgggatta

SEQ ID NO: 81567 - DNA, 40 bp, Homo sapiens
taatcccagctactcaggaggctgaggcaggagaattgct

SEQ ID NO: 81568 - DNA, 40 bp, Homo sapiens
gcaattctcctgcctcagcctcctgagtagctgggattac

SEQ ID NO: 81569 - DNA, 40 bp, Homo sapiens
gtaatcccagctactcaggaggctgaggcaggagaattgc

SEQ ID NO: 81570 - DNA, 40 bp, Homo sapiens
caattctcctgcctcagcctcctgagtagctgggattaca

SEQ ID NO: 81571 - DNA, 40 bp, Homo sapiens
tgtaatcccagctactcaggaggctgaggcaggagaattg

SEQ ID NO: 81572 - DNA, 40 bp, Homo sapiens
aattctcctgcctcagcctcctgagtagctgggattacag

SEQ ID NO: 81573 - DNA, 40 bp, Homo sapiens
ctgtaatcccagctactcaggaggctgaggcaggagaatt

SEQ ID NO: 81574 - DNA, 40 bp, Homo sapiens
attctcctgcctcagcctcctgagtagctgggattacagg

SEQ ID NO: 81575 - DNA, 40 bp, Homo sapiens
cctgtaatcccagctactcaggaggctgaggcaggagaat

SEQ ID NO: 81576 - DNA, 40 bp, Homo sapiens
ttctcctgcctcagcctcctgagtagctgggattacaggc

SEQ ID NO: 81577 - DNA, 40 bp, Homo sapiens
gcctgtaatcccagctactcaggaggctgaggcaggagaa

SEQ ID NO: 81578 - DNA, 40 bp, Homo sapiens
tctcctgcctcagcctcctgagtagctgggattacaggca

SEQ ID NO: 81579 - DNA, 40 bp, Homo sapiens
tgcctgtaatcccagctactcaggaggctgaggcaggaga

SEQ ID NO: 81580 - DNA, 40 bp, Homo sapiens
ctcctgcctcagcctcctgagtagctgggattacaggcac

SEQ ID NO: 81581 - DNA, 40 bp, Homo sapiens
gtgcctgtaatcccagctactcaggaggctgaggcaggag

SEQ ID NO: 81582 - DNA, 40 bp, Homo sapiens
tcctgcctcagcctcctgagtagctgggattacaggcacc

SEQ ID NO: 81583 - DNA, 40 bp, Homo sapiens
ggtgcctgtaatcccagctactcaggaggctgaggcagga

SEQ ID NO: 81584 - DNA, 40 bp, Homo sapiens
cctgcctcagcctcctgagtagctgggattacaggcacct

SEQ ID NO: 81585 - DNA, 40 bp, Homo sapiens
aggtgcctgtaatcccagctactcaggaggctgaggcagg

SEQ ID NO: 81586 - DNA, 40 bp, Homo sapiens
ctgcctcagcctcctgagtagctgggattacaggcacctg

SEQ ID NO: 81587 - DNA, 40 bp, Homo sapiens
caggtgcctgtaatcccagctactcaggaggctgaggcag

SEQ ID NO: 81588 - DNA, 40 bp, Homo sapiens
tgcctcagcctcctgagtagctgggattacaggcacctgc

SEQ ID NO: 81589 - DNA, 40 bp, Homo sapiens
gcaggtgcctgtaatcccagctactcaggaggctgaggca

SEQ ID NO: 81590 - DNA, 40 bp, Homo sapiens
gcctcagcctcctgagtagctgggattacaggcacctgct

SEQ ID NO: 81591 - DNA, 40 bp, Homo sapiens
agcaggtgcctgtaatcccagctactcaggaggctgaggc

SEQ ID NO: 81592 - DNA, 40 bp, Homo sapiens
cctcagcctcctgagtagctgggattacaggcacctgcta

SEQ ID NO: 81593 - DNA, 40 bp, Homo sapiens
tagcaggtgcctgtaatcccagctactcaggaggctgagg

SEQ ID NO: 81594 - DNA, 40 bp, Homo sapiens
ctcagcctcctgagtagctgggattacaggcacctgctac

SEQ ID NO: 81595 - DNA, 40 bp, Homo sapiens
gtagcaggtgcctgtaatcccagctactcaggaggctgag

SEQ ID NO: 81596 - DNA, 40 bp, Homo sapiens
tcagcctcctgagtagctgggattacaggcacctgctacc

SEQ ID NO: 81597 - DNA, 40 bp, Homo sapiens
ggtagcaggtgcctgtaatcccagctactcaggaggctga

SEQ ID NO: 81598 - DNA, 40 bp, Homo sapiens
cagcctcctgagtagctgggattacaggcacctgctacca

SEQ ID NO: 81599 - DNA, 40 bp, Homo sapiens
tggtagcaggtgcctgtaatcccagctactcaggaggctg

SEQ ID NO: 81600 - DNA, 40 bp, Homo sapiens
agcctcctgagtagctgggattacaggcacctgctaccac

SEQ ID NO: 81601 - DNA, 40 bp, Homo sapiens
gtggtagcaggtgcctgtaatcccagctactcaggaggct

SEQ ID NO: 81602 - DNA, 40 bp, Homo sapiens
gcctcctgagtagctgggattacaggcacctgctaccaca

SEQ ID NO: 81603 - DNA, 40 bp, Homo sapiens
tgtggtagcaggtgcctgtaatcccagctactcaggaggc

SEQ ID NO: 81604 - DNA, 40 bp, Homo sapiens
cctcctgagtagctgggattacaggcacctgctaccacac

SEQ ID NO: 81605 - DNA, 40 bp, Homo sapiens
gtgtggtagcaggtgcctgtaatcccagctactcaggagg

SEQ ID NO: 81606 - DNA, 40 bp, Homo sapiens
ctcctgagtagctgggattacaggcacctgctaccacacc

SEQ ID NO: 81607 - DNA, 40 bp, Homo sapiens
ggtgtggtagcaggtgcctgtaatcccagctactcaggag

SEQ ID NO: 81608 - DNA, 40 bp, Homo sapiens
tcctgagtagctgggattacaggcacctgctaccacaccc

SEQ ID NO: 81609 - DNA, 40 bp, Homo sapiens
gggtgtggtagcaggtgcctgtaatcccagctactcagga

SEQ ID NO: 81610 - DNA, 40 bp, Homo sapiens
cctgagtagctgggattacaggcacctgctaccacaccca

SEQ ID NO: 81611 - DNA, 40 bp, Homo sapiens
tgggtgtggtagcaggtgcctgtaatcccagctactcagg

SEQ ID NO: 81612 - DNA, 40 bp, Homo sapiens
ctgagtagctgggattacaggcacctgctaccacacccag

SEQ ID NO: 81613 - DNA, 40 bp, Homo sapiens
ctgggtgtggtagcaggtgcctgtaatcccagctactcag

SEQ ID NO: 81614 - DNA, 40 bp, Homo sapiens
tgagtagctgggattacaggcacctgctaccacacccagc

SEQ ID NO: 81615 - DNA, 40 bp, Homo sapiens
gctgggtgtggtagcaggtgcctgtaatcccagctactca

SEQ ID NO: 81616 - DNA, 40 bp, Homo sapiens
gagtagctgggattacaggcacctgctaccacacccagct

SEQ ID NO: 81617 - DNA, 40 bp, Homo sapiens
agctgggtgtggtagcaggtgcctgtaatcccagctactc

SEQ ID NO: 81618 - DNA, 40 bp, Homo sapiens
agtagctgggattacaggcacctgctaccacacccagcta

SEQ ID NO: 81619 - DNA, 40 bp, Homo sapiens
tagctgggtgtggtagcaggtgcctgtaatcccagctact

SEQ ID NO: 81620 - DNA, 40 bp, Homo sapiens
gtagctgggattacaggcacctgctaccacacccagctaa

SEQ ID NO: 81621 - DNA, 40 bp, Homo sapiens
ttagctgggtgtggtagcaggtgcctgtaatcccagctac

SEQ ID NO: 81622 - DNA, 40 bp, Homo sapiens
tagctgggattacaggcacctgctaccacacccagctaat

SEQ ID NO: 81623 - DNA, 40 bp, Homo sapiens
attagctgggtgtggtagcaggtgcctgtaatcccagcta

SEQ ID NO: 81624 - DNA, 40 bp, Homo sapiens
agctgggattacaggcacctgctaccacacccagctaatt

SEQ ID NO: 81625 - DNA, 40 bp, Homo sapiens
aattagctgggtgtggtagcaggtgcctgtaatcccagct

SEQ ID NO: 81626 - DNA, 40 bp, Homo sapiens
gctgggattacaggcacctgctaccacacccagctaattt

SEQ ID NO: 81627 - DNA, 40 bp, Homo sapiens
aaattagctgggtgtggtagcaggtgcctgtaatcccagc

SEQ ID NO: 81628 - DNA, 40 bp, Homo sapiens
ctgggattacaggcacctgctaccacacccagctaatttt

SEQ ID NO: 81629 - DNA, 40 bp, Homo sapiens
aaaattagctgggtgtggtagcaggtgcctgtaatcccag

SEQ ID NO: 81630 - DNA, 40 bp, Homo sapiens
tgggattacaggcacctgctaccacacccagctaattttt

SEQ ID NO: 81631 - DNA, 40 bp, Homo sapiens
aaaaattagctgggtgtggtagcaggtgcctgtaatccca

SEQ ID NO: 81632 - DNA, 40 bp, Homo sapiens
gggattacaggcacctgctaccacacccagctaatttttg

SEQ ID NO: 81633 - DNA, 40 bp, Homo sapiens
caaaaattagctgggtgtggtagcaggtgcctgtaatccc

SEQ ID NO: 81634 - DNA, 40 bp, Homo sapiens
ggattacaggcacctgctaccacacccagctaatttttgt

SEQ ID NO: 81635 - DNA, 40 bp, Homo sapiens
acaaaaattagctgggtgtggtagcaggtgcctgtaatcc

SEQ ID NO: 81636 - DNA, 40 bp, Homo sapiens
gattacaggcacctgctaccacacccagctaatttttgta

SEQ ID NO: 81637 - DNA, 40 bp, Homo sapiens
tacaaaaattagctgggtgtggtagcaggtgcctgtaatc

SEQ ID NO: 81638 - DNA, 40 bp, Homo sapiens
attacaggcacctgctaccacacccagctaatttttgtat

SEQ ID NO: 81639 - DNA, 40 bp, Homo sapiens
atacaaaaattagctgggtgtggtagcaggtgcctgtaat

SEQ ID NO: 81640 - DNA, 40 bp, Homo sapiens
ttacaggcacctgctaccacacccagctaatttttgtatt

SEQ ID NO: 81641 - DNA, 40 bp, Homo sapiens
aatacaaaaattagctgggtgtggtagcaggtgcctgtaa

SEQ ID NO: 81642 - DNA, 40 bp, Homo sapiens
tacaggcacctgctaccacacccagctaatttttgtattt

SEQ ID NO: 81643 - DNA, 40 bp, Homo sapiens
aaatacaaaaattagctgggtgtggtagcaggtgcctgta

SEQ ID NO: 81644 - DNA, 40 bp, Homo sapiens
acaggcacctgctaccacacccagctaatttttgtatttt

SEQ ID NO: 81645 - DNA, 40 bp, Homo sapiens
aaaatacaaaaattagctgggtgtggtagcaggtgcctgt

SEQ ID NO: 81646 - DNA, 40 bp, Homo sapiens
caggcacctgctaccacacccagctaatttttgtattttt

SEQ ID NO: 81647 - DNA, 40 bp, Homo sapiens
aaaaatacaaaaattagctgggtgtggtagcaggtgcctg

SEQ ID NO: 81648 - DNA, 40 bp, Homo sapiens
aggcacctgctaccacacccagctaatttttgtattttta

SEQ ID NO: 81649 - DNA, 40 bp, Homo sapiens
taaaaatacaaaaattagctgggtgtggtagcaggtgcct

SEQ ID NO: 81650 - DNA, 40 bp, Homo sapiens
ggcacctgctaccacacccagctaatttttgtatttttag

SEQ ID NO: 81651 - DNA, 40 bp, Homo sapiens
ctaaaaatacaaaaattagctgggtgtggtagcaggtgcc

SEQ ID NO: 81652 - DNA, 40 bp, Homo sapiens
gcacctgctaccacacccagctaatttttgtatttttagt

SEQ ID NO: 81653 - DNA, 40 bp, Homo sapiens
actaaaaatacaaaaattagctgggtgtggtagcaggtgc

SEQ ID NO: 81654 - DNA, 40 bp, Homo sapiens
cacctgctaccacacccagctaatttttgtatttttagta

SEQ ID NO: 81655 - DNA, 40 bp, Homo sapiens
tactaaaaatacaaaaattagctgggtgtggtagcaggtg

SEQ ID NO: 81656 - DNA, 40 bp, Homo sapiens
acctgctaccacacccagctaatttttgtatttttagtag

SEQ ID NO: 81657 - DNA, 40 bp, Homo sapiens
ctactaaaaatacaaaaattagctgggtgtggtagcaggt

SEQ ID NO: 81658 - DNA, 40 bp, Homo sapiens
cctgctaccacacccagctaatttttgtatttttagtaga

SEQ ID NO: 81659 - DNA, 40 bp, Homo sapiens
tctactaaaaatacaaaaattagctgggtgtggtagcagg

SEQ ID NO: 81660 - DNA, 40 bp, Homo sapiens
ctgctaccacacccagctaatttttgtatttttagtagag

SEQ ID NO: 81661 - DNA, 40 bp, Homo sapiens
ctctactaaaaatacaaaaattagctgggtgtggtagcag

SEQ ID NO: 81662 - DNA, 40 bp, Homo sapiens
tgctaccacacccagctaatttttgtatttttagtagaga

SEQ ID NO: 81663 - DNA, 40 bp, Homo sapiens
tctctactaaaaatacaaaaattagctgggtgtggtagca

SEQ ID NO: 81664 - DNA, 40 bp, Homo sapiens
gctaccacacccagctaatttttgtatttttagtagagac

SEQ ID NO: 81665 - DNA, 40 bp, Homo sapiens
gtctctactaaaaatacaaaaattagctgggtgtggtagc

SEQ ID NO: 81666 - DNA, 40 bp, Homo sapiens
ctaccacacccagctaatttttgtatttttagtagagaca

SEQ ID NO: 81667 - DNA, 40 bp, Homo sapiens
tgtctctactaaaaatacaaaaattagctgggtgtggtag

SEQ ID NO: 81668 - DNA, 40 bp, Homo sapiens
taccacacccagctaatttttgtatttttagtagagacag

SEQ ID NO: 81669 - DNA, 40 bp, Homo sapiens
ctgtctctactaaaaatacaaaaattagctgggtgtggta

SEQ ID NO: 81670 - DNA, 40 bp, Homo sapiens
accacacccagctaatttttgtatttttagtagagacagg

SEQ ID NO: 81671 - DNA, 40 bp, Homo sapiens
cctgtctctactaaaaatacaaaaattagctgggtgtggt

SEQ ID NO: 81672 - DNA, 40 bp, Homo sapiens
ccacacccagctaatttttgtatttttagtagagacaggg

SEQ ID NO: 81673 - DNA, 40 bp, Homo sapiens
ccctgtctctactaaaaatacaaaaattagctgggtgtgg

SEQ ID NO: 81674 - DNA, 40 bp, Homo sapiens
cacacccagctaatttttgtatttttagtagagacagggt

SEQ ID NO: 81675 - DNA, 40 bp, Homo sapiens
accctgtctctactaaaaatacaaaaattagctgggtgtg

SEQ ID NO: 81676 - DNA, 40 bp, Homo sapiens
acacccagctaatttttgtatttttagtagagacagggtt

SEQ ID NO: 81677 - DNA, 40 bp, Homo sapiens
aaccctgtctctactaaaaatacaaaaattagctgggtgt

SEQ ID NO: 81678 - DNA, 40 bp, Homo sapiens
cacccagctaatttttgtatttttagtagagacagggttt

SEQ ID NO: 81679 - DNA, 40 bp, Homo sapiens
aaaccctgtctctactaaaaatacaaaaattagctgggtg

SEQ ID NO: 81680 - DNA, 40 bp, Homo sapiens
acccagctaatttttgtatttttagtagagacagggtttc

SEQ ID NO: 81681 - DNA, 40 bp, Homo sapiens
gaaaccctgtctctactaaaaatacaaaaattagctgggt

SEQ ID NO: 81682 - DNA, 40 bp, Homo sapiens
cccagctaatttttgtatttttagtagagacagggtttca

SEQ ID NO: 81683 - DNA, 40 bp, Homo sapiens
tgaaaccctgtctctactaaaaatacaaaaattagctggg

SEQ ID NO: 81684 - DNA, 40 bp, Homo sapiens
ccagctaatttttgtatttttagtagagacagggtttcac

SEQ ID NO: 81685 - DNA, 40 bp, Homo sapiens
gtgaaaccctgtctctactaaaaatacaaaaattagctgg

SEQ ID NO: 81686 - DNA, 40 bp, Homo sapiens
cagctaatttttgtatttttagtagagacagggtttcacc

SEQ ID NO: 81687 - DNA, 40 bp, Homo sapiens
ggtgaaaccctgtctctactaaaaatacaaaaattagctg

SEQ ID NO: 81688 - DNA, 40 bp, Homo sapiens
agctaatttttgtatttttagtagagacagggtttcacca

SEQ ID NO: 81689 - DNA, 40 bp, Homo sapiens
tggtgaaaccctgtctctactaaaaatacaaaaattagct

SEQ ID NO: 81690 - DNA, 40 bp, Homo sapiens
gctaatttttgtatttttagtagagacagggtttcaccat

SEQ ID NO: 81691 - DNA, 40 bp, Homo sapiens
atggtgaaaccctgtctctactaaaaatacaaaaattagc

SEQ ID NO: 81692 - DNA, 40 bp, Homo sapiens
ctaatttttgtatttttagtagagacagggtttcaccatg

SEQ ID NO: 81693 - DNA, 40 bp, Homo sapiens
catggtgaaaccctgtctctactaaaaatacaaaaattag

SEQ ID NO: 81694 - DNA, 40 bp, Homo sapiens
taatttttgtatttttagtagagacagggtttcaccatgt

SEQ ID NO: 81695 - DNA, 40 bp, Homo sapiens
acatggtgaaaccctgtctctactaaaaatacaaaaatta

SEQ ID NO: 81696 - DNA, 40 bp, Homo sapiens
aatttttgtatttttagtagagacagggtttcaccatgtt

SEQ ID NO: 81697 - DNA, 40 bp, Homo sapiens
aacatggtgaaaccctgtctctactaaaaatacaaaaatt

SEQ ID NO: 81698 - DNA, 40 bp, Homo sapiens
atttttgtatttttagtagagacagggtttcaccatgttg

SEQ ID NO: 81699 - DNA, 40 bp, Homo sapiens
caacatggtgaaaccctgtctctactaaaaatacaaaaat

SEQ ID NO: 81700 - DNA, 40 bp, Homo sapiens
tttttgtatttttagtagagacagggtttcaccatgttgg

SEQ ID NO: 81701 - DNA, 40 bp, Homo sapiens
ccaacatggtgaaaccctgtctctactaaaaatacaaaaa

SEQ ID NO: 81702 - DNA, 40 bp, Homo sapiens
ttttgtatttttagtagagacagggtttcaccatgttggc

SEQ ID NO: 81703 - DNA, 40 bp, Homo sapiens
gccaacatggtgaaaccctgtctctactaaaaatacaaaa

SEQ ID NO: 81704 - DNA, 40 bp, Homo sapiens
tttgtatttttagtagagacagggtttcaccatgttggcc

SEQ ID NO: 81705 - DNA, 40 bp, Homo sapiens
ggccaacatggtgaaaccctgtctctactaaaaatacaaa

SEQ ID NO: 81706 - DNA, 40 bp, Homo sapiens
ttgtatttttagtagagacagggtttcaccatgttggcca

SEQ ID NO: 81707 - DNA, 40 bp, Homo sapiens
tggccaacatggtgaaaccctgtctctactaaaaatacaa

SEQ ID NO: 81708 - DNA, 40 bp, Homo sapiens
tgtatttttagtagagacagggtttcaccatgttggccag

SEQ ID NO: 81709 - DNA, 40 bp, Homo sapiens
ctggccaacatggtgaaaccctgtctctactaaaaataca

SEQ ID NO: 81710 - DNA, 40 bp, Homo sapiens
gtatttttagtagagacagggtttcaccatgttggccagg

SEQ ID NO: 81711 - DNA, 40 bp, Homo sapiens
cctggccaacatggtgaaaccctgtctctactaaaaatac

SEQ ID NO: 81712 - DNA, 40 bp, Homo sapiens
tatttttagtagagacagggtttcaccatgttggccaggc

SEQ ID NO: 81713 - DNA, 40 bp, Homo sapiens
gcctggccaacatggtgaaaccctgtctctactaaaaata

SEQ ID NO: 81714 - DNA, 40 bp, Homo sapiens
atttttagtagagacagggtttcaccatgttggccaggct

SEQ ID NO: 81715 - DNA, 40 bp, Homo sapiens
agcctggccaacatggtgaaaccctgtctctactaaaaat

SEQ ID NO: 81716 - DNA, 40 bp, Homo sapiens
tttttagtagagacagggtttcaccatgttggccaggctg

SEQ ID NO: 81717 - DNA, 40 bp, Homo sapiens
cagcctggccaacatggtgaaaccctgtctctactaaaaa

SEQ ID NO: 81718 - DNA, 40 bp, Homo sapiens
ttttagtagagacagggtttcaccatgttggccaggctgg

SEQ ID NO: 81719 - DNA, 40 bp, Homo sapiens
ccagcctggccaacatggtgaaaccctgtctctactaaaa

SEQ ID NO: 81720 - DNA, 40 bp, Homo sapiens
tttagtagagacagggtttcaccatgttggccaggctggt

SEQ ID NO: 81721 - DNA, 40 bp, Homo sapiens
accagcctggccaacatggtgaaaccctgtctctactaaa

SEQ ID NO: 81722 - DNA, 40 bp, Homo sapiens
ttagtagagacagggtttcaccatgttggccaggctggtc

SEQ ID NO: 81723 - DNA, 40 bp, Homo sapiens
gaccagcctggccaacatggtgaaaccctgtctctactaa

SEQ ID NO: 81724 - DNA, 40 bp, Homo sapiens
tagtagagacagggtttcaccatgttggccaggctggtct

SEQ ID NO: 81725 - DNA, 40 bp, Homo sapiens
agaccagcctggccaacatggtgaaaccctgtctctacta

SEQ ID NO: 81726 - DNA, 40 bp, Homo sapiens
agtagagacagggtttcaccatgttggccaggctggtctg

SEQ ID NO: 81727 - DNA, 40 bp, Homo sapiens
cagaccagcctggccaacatggtgaaaccctgtctctact

SEQ ID NO: 81728 - DNA, 40 bp, Homo sapiens
gtagagacagggtttcaccatgttggccaggctggtctga

SEQ ID NO: 81729 - DNA, 40 bp, Homo sapiens
tcagaccagcctggccaacatggtgaaaccctgtctctac

SEQ ID NO: 81730 - DNA, 40 bp, Homo sapiens
tagagacagggtttcaccatgttggccaggctggtctgaa

SEQ ID NO: 81731 - DNA, 40 bp, Homo sapiens
ttcagaccagcctggccaacatggtgaaaccctgtctcta

SEQ ID NO: 81732 - DNA, 40 bp, Homo sapiens
agagacagggtttcaccatgttggccaggctggtctgaaa

SEQ ID NO: 81733 - DNA, 40 bp, Homo sapiens
tttcagaccagcctggccaacatggtgaaaccctgtctct

SEQ ID NO: 81734 - DNA, 40 bp, Homo sapiens
gagacagggtttcaccatgttggccaggctggtctgaaac

SEQ ID NO: 81735 - DNA, 40 bp, Homo sapiens
gtttcagaccagcctggccaacatggtgaaaccctgtctc

SEQ ID NO: 81736 - DNA, 40 bp, Homo sapiens
agacagggtttcaccatgttggccaggctggtctgaaact

SEQ ID NO: 81737 - DNA, 40 bp, Homo sapiens
agtttcagaccagcctggccaacatggtgaaaccctgtct

SEQ ID NO: 81738 - DNA, 40 bp, Homo sapiens
gacagggtttcaccatgttggccaggctggtctgaaactc

SEQ ID NO: 81739 - DNA, 40 bp, Homo sapiens
gagtttcagaccagcctggccaacatggtgaaaccctgtc

SEQ ID NO: 81740 - DNA, 40 bp, Homo sapiens
acagggtttcaccatgttggccaggctggtctgaaactcc

SEQ ID NO: 81741 - DNA, 40 bp, Homo sapiens
ggagtttcagaccagcctggccaacatggtgaaaccctgt

SEQ ID NO: 81742 - DNA, 40 bp, Homo sapiens
cagggtttcaccatgttggccaggctggtctgaaactcct

SEQ ID NO: 81743 - DNA, 40 bp, Homo sapiens
aggagtttcagaccagcctggccaacatggtgaaaccctg

SEQ ID NO: 81744 - DNA, 40 bp, Homo sapiens
agggtttcaccatgttggccaggctggtctgaaactcctc

SEQ ID NO: 81745 - DNA, 40 bp, Homo sapiens
gaggagtttcagaccagcctggccaacatggtgaaaccct

SEQ ID NO: 81746 - DNA, 40 bp, Homo sapiens
gggtttcaccatgttggccaggctggtctgaaactcctca

SEQ ID NO: 81747 - DNA, 40 bp, Homo sapiens
tgaggagtttcagaccagcctggccaacatggtgaaaccc

SEQ ID NO: 81748 - DNA, 40 bp, Homo sapiens
ggtttcaccatgttggccaggctggtctgaaactcctcac

SEQ ID NO: 81749 - DNA, 40 bp, Homo sapiens
gtgaggagtttcagaccagcctggccaacatggtgaaacc

SEQ ID NO: 81750 - DNA, 40 bp, Homo sapiens
gtttcaccatgttggccaggctggtctgaaactcctcacc

SEQ ID NO: 81751 - DNA, 40 bp, Homo sapiens
ggtgaggagtttcagaccagcctggccaacatggtgaaac

SEQ ID NO: 81752 - DNA, 40 bp, Homo sapiens
tttcaccatgttggccaggctggtctgaaactcctcacct

SEQ ID NO: 81753 - DNA, 40 bp, Homo sapiens
aggtgaggagtttcagaccagcctggccaacatggtgaaa

SEQ ID NO: 81754 - DNA, 40 bp, Homo sapiens
ttcaccatgttggccaggctggtctgaaactcctcacctc

SEQ ID NO: 81755 - DNA, 40 bp, Homo sapiens
gaggtgaggagtttcagaccagcctggccaacatggtgaa

SEQ ID NO: 81756 - DNA, 40 bp, Homo sapiens
tcaccatgttggccaggctggtctgaaactcctcacctca

SEQ ID NO: 81757 - DNA, 40 bp, Homo sapiens
tgaggtgaggagtttcagaccagcctggccaacatggtga

SEQ ID NO: 81758 - DNA, 40 bp, Homo sapiens
caccatgttggccaggctggtctgaaactcctcacctcaa

SEQ ID NO: 81759 - DNA, 40 bp, Homo sapiens
ttgaggtgaggagtttcagaccagcctggccaacatggtg

SEQ ID NO: 81760 - DNA, 40 bp, Homo sapiens
accatgttggccaggctggtctgaaactcctcacctcaag

SEQ ID NO: 81761 - DNA, 40 bp, Homo sapiens
cttgaggtgaggagtttcagaccagcctggccaacatggt

SEQ ID NO: 81762 - DNA, 40 bp, Homo sapiens
ccatgttggccaggctggtctgaaactcctcacctcaagt

SEQ ID NO: 81763 - DNA, 40 bp, Homo sapiens
acttgaggtgaggagtttcagaccagcctggccaacatgg

SEQ ID NO: 81764 - DNA, 40 bp, Homo sapiens
catgttggccaggctggtctgaaactcctcacctcaagtg

SEQ ID NO: 81765 - DNA, 40 bp, Homo sapiens
cacttgaggtgaggagtttcagaccagcctggccaacatg

SEQ ID NO: 81766 - DNA, 40 bp, Homo sapiens
atgttggccaggctggtctgaaactcctcacctcaagtga

SEQ ID NO: 81767 - DNA, 40 bp, Homo sapiens
tcacttgaggtgaggagtttcagaccagcctggccaacat

SEQ ID NO: 81768 - DNA, 40 bp, Homo sapiens
tgttggccaggctggtctgaaactcctcacctcaagtgat

SEQ ID NO: 81769 - DNA, 40 bp, Homo sapiens
atcacttgaggtgaggagtttcagaccagcctggccaaca

SEQ ID NO: 81770 - DNA, 40 bp, Homo sapiens
gttggccaggctggtctgaaactcctcacctcaagtgatc

SEQ ID NO: 81771 - DNA, 40 bp, Homo sapiens
gatcacttgaggtgaggagtttcagaccagcctggccaac

SEQ ID NO: 81772 - DNA, 40 bp, Homo sapiens
ttggccaggctggtctgaaactcctcacctcaagtgatcc

SEQ ID NO: 81773 - DNA, 40 bp, Homo sapiens
ggatcacttgaggtgaggagtttcagaccagcctggccaa

SEQ ID NO: 81774 - DNA, 40 bp, Homo sapiens
tggccaggctggtctgaaactcctcacctcaagtgatcca

SEQ ID NO: 81775 - DNA, 40 bp, Homo sapiens
tggatcacttgaggtgaggagtttcagaccagcctggcca

SEQ ID NO: 81776 - DNA, 40 bp, Homo sapiens
ggccaggctggtctgaaactcctcacctcaagtgatccac

SEQ ID NO: 81777 - DNA, 40 bp, Homo sapiens
gtggatcacttgaggtgaggagtttcagaccagcctggcc

SEQ ID NO: 81778 - DNA, 40 bp, Homo sapiens
gccaggctggtctgaaactcctcacctcaagtgatccacc

SEQ ID NO: 81779 - DNA, 40 bp, Homo sapiens
ggtggatcacttgaggtgaggagtttcagaccagcctggc

SEQ ID NO: 81780 - DNA, 40 bp, Homo sapiens
ccaggctggtctgaaactcctcacctcaagtgatccaccc

SEQ ID NO: 81781 - DNA, 40 bp, Homo sapiens
gggtggatcacttgaggtgaggagtttcagaccagcctgg

SEQ ID NO: 81782 - DNA, 40 bp, Homo sapiens
caggctggtctgaaactcctcacctcaagtgatccacccg

SEQ ID NO: 81783 - DNA, 40 bp, Homo sapiens
cgggtggatcacttgaggtgaggagtttcagaccagcctg

SEQ ID NO: 81784 - DNA, 40 bp, Homo sapiens
aggctggtctgaaactcctcacctcaagtgatccacccgt

SEQ ID NO: 81785 - DNA, 40 bp, Homo sapiens
acgggtggatcacttgaggtgaggagtttcagaccagcct

SEQ ID NO: 81786 - DNA, 40 bp, Homo sapiens
ggctggtctgaaactcctcacctcaagtgatccacccgtc

SEQ ID NO: 81787 - DNA, 40 bp, Homo sapiens
gacgggtggatcacttgaggtgaggagtttcagaccagcc

SEQ ID NO: 81788 - DNA, 40 bp, Homo sapiens
gctggtctgaaactcctcacctcaagtgatccacccgtct

SEQ ID NO: 81789 - DNA, 40 bp, Homo sapiens
agacgggtggatcacttgaggtgaggagtttcagaccagc

SEQ ID NO: 81790 - DNA, 40 bp, Homo sapiens
ctggtctgaaactcctcacctcaagtgatccacccgtctt

SEQ ID NO: 81791 - DNA, 40 bp, Homo sapiens
aagacgggtggatcacttgaggtgaggagtttcagaccag

SEQ ID NO: 81792 - DNA, 40 bp, Homo sapiens
tggtctgaaactcctcacctcaagtgatccacccgtcttg

SEQ ID NO: 81793 - DNA, 40 bp, Homo sapiens
caagacgggtggatcacttgaggtgaggagtttcagacca

SEQ ID NO: 81794 - DNA, 40 bp, Homo sapiens
ggtctgaaactcctcacctcaagtgatccacccgtcttgg

SEQ ID NO: 81795 - DNA, 40 bp, Homo sapiens
ccaagacgggtggatcacttgaggtgaggagtttcagacc

SEQ ID NO: 81796 - DNA, 40 bp, Homo sapiens
gtctgaaactcctcacctcaagtgatccacccgtcttggc

SEQ ID NO: 81797 - DNA, 40 bp, Homo sapiens
gccaagacgggtggatcacttgaggtgaggagtttcagac

SEQ ID NO: 81798 - DNA, 40 bp, Homo sapiens
tctgaaactcctcacctcaagtgatccacccgtcttggcc

SEQ ID NO: 81799 - DNA, 40 bp, Homo sapiens
ggccaagacgggtggatcacttgaggtgaggagtttcaga

SEQ ID NO: 81800 - DNA, 40 bp, Homo sapiens
ctgaaactcctcacctcaagtgatccacccgtcttggcct

SEQ ID NO: 81801 - DNA, 40 bp, Homo sapiens
aggccaagacgggtggatcacttgaggtgaggagtttcag

SEQ ID NO: 81802 - DNA, 40 bp, Homo sapiens
tgaaactcctcacctcaagtgatccacccgtcttggcctc

SEQ ID NO: 81803 - DNA, 40 bp, Homo sapiens
gaggccaagacgggtggatcacttgaggtgaggagtttca

SEQ ID NO: 81804 - DNA, 40 bp, Homo sapiens
gaaactcctcacctcaagtgatccacccgtcttggcctcc

SEQ ID NO: 81805 - DNA, 40 bp, Homo sapiens
ggaggccaagacgggtggatcacttgaggtgaggagtttc

SEQ ID NO: 81806 - DNA, 40 bp, Homo sapiens
aaactcctcacctcaagtgatccacccgtcttggcctccc

SEQ ID NO: 81807 - DNA, 40 bp, Homo sapiens
gggaggccaagacgggtggatcacttgaggtgaggagttt

SEQ ID NO: 81808 - DNA, 40 bp, Homo sapiens
aactcctcacctcaagtgatccacccgtcttggcctccca

SEQ ID NO: 81809 - DNA, 40 bp, Homo sapiens
tgggaggccaagacgggtggatcacttgaggtgaggagtt

SEQ ID NO: 81810 - DNA, 40 bp, Homo sapiens
actcctcacctcaagtgatccacccgtcttggcctcccaa

SEQ ID NO: 81811 - DNA, 40 bp, Homo sapiens
ttgggaggccaagacgggtggatcacttgaggtgaggagt

SEQ ID NO: 81812 - DNA, 40 bp, Homo sapiens
ctcctcacctcaagtgatccacccgtcttggcctcccaaa

SEQ ID NO: 81813 - DNA, 40 bp, Homo sapiens
tttgggaggccaagacgggtggatcacttgaggtgaggag

SEQ ID NO: 81814 - DNA, 40 bp, Homo sapiens
tcctcacctcaagtgatccacccgtcttggcctcccaaag

SEQ ID NO: 81815 - DNA, 40 bp, Homo sapiens
ctttgggaggccaagacgggtggatcacttgaggtgagga

SEQ ID NO: 81816 - DNA, 40 bp, Homo sapiens
cctcacctcaagtgatccacccgtcttggcctcccaaagt

SEQ ID NO: 81817 - DNA, 40 bp, Homo sapiens
actttgggaggccaagacgggtggatcacttgaggtgagg

SEQ ID NO: 81818 - DNA, 40 bp, Homo sapiens
ctcacctcaagtgatccacccgtcttggcctcccaaagtg

SEQ ID NO: 81819 - DNA, 40 bp, Homo sapiens
cactttgggaggccaagacgggtggatcacttgaggtgag

SEQ ID NO: 81820 - DNA, 40 bp, Homo sapiens
tcacctcaagtgatccacccgtcttggcctcccaaagtgc

SEQ ID NO: 81821 - DNA, 40 bp, Homo sapiens
gcactttgggaggccaagacgggtggatcacttgaggtga

SEQ ID NO: 81822 - DNA, 40 bp, Homo sapiens
cacctcaagtgatccacccgtcttggcctcccaaagtgct

SEQ ID NO: 81823 - DNA, 40 bp, Homo sapiens
agcactttgggaggccaagacgggtggatcacttgaggtg

SEQ ID NO: 81824 - DNA, 40 bp, Homo sapiens
acctcaagtgatccacccgtcttggcctcccaaagtgctg

SEQ ID NO: 81825 - DNA, 40 bp, Homo sapiens
cagcactttgggaggccaagacgggtggatcacttgaggt

SEQ ID NO: 81826 - DNA, 40 bp, Homo sapiens
cctcaagtgatccacccgtcttggcctcccaaagtgctgg

SEQ ID NO: 81827 - DNA, 40 bp, Homo sapiens
ccagcactttgggaggccaagacgggtggatcacttgagg

SEQ ID NO: 81828 - DNA, 40 bp, Homo sapiens
ctcaagtgatccacccgtcttggcctcccaaagtgctggg

SEQ ID NO: 81829 - DNA, 40 bp, Homo sapiens
cccagcactttgggaggccaagacgggtggatcacttgag

SEQ ID NO: 81830 - DNA, 40 bp, Homo sapiens
tcaagtgatccacccgtcttggcctcccaaagtgctggga

SEQ ID NO: 81831 - DNA, 40 bp, Homo sapiens
tcccagcactttgggaggccaagacgggtggatcacttga

SEQ ID NO: 81832 - DNA, 40 bp, Homo sapiens
caagtgatccacccgtcttggcctcccaaagtgctgggat

SEQ ID NO: 81833 - DNA, 40 bp, Homo sapiens
atcccagcactttgggaggccaagacgggtggatcacttg

SEQ ID NO: 81834 - DNA, 40 bp, Homo sapiens
aagtgatccacccgtcttggcctcccaaagtgctgggatt

SEQ ID NO: 81835 - DNA, 40 bp, Homo sapiens
aatcccagcactttgggaggccaagacgggtggatcactt

SEQ ID NO: 81836 - DNA, 40 bp, Homo sapiens
agtgatccacccgtcttggcctcccaaagtgctgggatta

SEQ ID NO: 81837 - DNA, 40 bp, Homo sapiens
taatcccagcactttgggaggccaagacgggtggatcact

SEQ ID NO: 81838 - DNA, 40 bp, Homo sapiens
gtgatccacccgtcttggcctcccaaagtgctgggattac

SEQ ID NO: 81839 - DNA, 40 bp, Homo sapiens
gtaatcccagcactttgggaggccaagacgggtggatcac

SEQ ID NO: 81840 - DNA, 40 bp, Homo sapiens
tgatccacccgtcttggcctcccaaagtgctgggattaca

SEQ ID NO: 81841 - DNA, 40 bp, Homo sapiens
tgtaatcccagcactttgggaggccaagacgggtggatca

SEQ ID NO: 81842 - DNA, 40 bp, Homo sapiens
gatccacccgtcttggcctcccaaagtgctgggattacag

SEQ ID NO: 81843 - DNA, 40 bp, Homo sapiens
ctgtaatcccagcactttgggaggccaagacgggtggatc

SEQ ID NO: 81844 - DNA, 40 bp, Homo sapiens
atccacccgtcttggcctcccaaagtgctgggattacagg

SEQ ID NO: 81845 - DNA, 40 bp, Homo sapiens
cctgtaatcccagcactttgggaggccaagacgggtggat

SEQ ID NO: 81846 - DNA, 40 bp, Homo sapiens
tccacccgtcttggcctcccaaagtgctgggattacaggc

SEQ ID NO: 81847 - DNA, 40 bp, Homo sapiens
gcctgtaatcccagcactttgggaggccaagacgggtgga

SEQ ID NO: 81848 - DNA, 40 bp, Homo sapiens
ccacccgtcttggcctcccaaagtgctgggattacaggct

SEQ ID NO: 81849 - DNA, 40 bp, Homo sapiens
agcctgtaatcccagcactttgggaggccaagacgggtgg

SEQ ID NO: 81850 - DNA, 40 bp, Homo sapiens
cacccgtcttggcctcccaaagtgctgggattacaggctt

SEQ ID NO: 81851 - DNA, 40 bp, Homo sapiens
aagcctgtaatcccagcactttgggaggccaagacgggtg

SEQ ID NO: 81852 - DNA, 40 bp, Homo sapiens
acccgtcttggcctcccaaagtgctgggattacaggcttg

SEQ ID NO: 81853 - DNA, 40 bp, Homo sapiens
caagcctgtaatcccagcactttgggaggccaagacgggt

SEQ ID NO: 81854 - DNA, 40 bp, Homo sapiens
cccgtcttggcctcccaaagtgctgggattacaggcttga

SEQ ID NO: 81855 - DNA, 40 bp, Homo sapiens
tcaagcctgtaatcccagcactttgggaggccaagacggg

SEQ ID NO: 81856 - DNA, 40 bp, Homo sapiens
ccgtcttggcctcccaaagtgctgggattacaggcttgag

SEQ ID NO: 81857 - DNA, 40 bp, Homo sapiens
ctcaagcctgtaatcccagcactttgggaggccaagacgg

SEQ ID NO: 81858 - DNA, 40 bp, Homo sapiens
cgtcttggcctcccaaagtgctgggattacaggcttgagc

SEQ ID NO: 81859 - DNA, 40 bp, Homo sapiens
gctcaagcctgtaatcccagcactttgggaggccaagacg

SEQ ID NO: 81860 - DNA, 40 bp, Homo sapiens
gtcttggcctcccaaagtgctgggattacaggcttgagcc

SEQ ID NO: 81861 - DNA, 40 bp, Homo sapiens
ggctcaagcctgtaatcccagcactttgggaggccaagac

SEQ ID NO: 81862 - DNA, 40 bp, Homo sapiens
tcttggcctcccaaagtgctgggattacaggcttgagcca

SEQ ID NO: 81863 - DNA, 40 bp, Homo sapiens
tggctcaagcctgtaatcccagcactttgggaggccaaga

SEQ ID NO: 81864 - DNA, 40 bp, Homo sapiens
cttggcctcccaaagtgctgggattacaggcttgagccac

SEQ ID NO: 81865 - DNA, 40 bp, Homo sapiens
gtggctcaagcctgtaatcccagcactttgggaggccaag

SEQ ID NO: 81866 - DNA, 40 bp, Homo sapiens
ttggcctcccaaagtgctgggattacaggcttgagccacc

SEQ ID NO: 81867 - DNA, 40 bp, Homo sapiens
ggtggctcaagcctgtaatcccagcactttgggaggccaa

SEQ ID NO: 81868 - DNA, 40 bp, Homo sapiens
tggcctcccaaagtgctgggattacaggcttgagccaccg

SEQ ID NO: 81869 - DNA, 40 bp, Homo sapiens
cggtggctcaagcctgtaatcccagcactttgggaggcca

SEQ ID NO: 81870 - DNA, 40 bp, Homo sapiens
ggcctcccaaagtgctgggattacaggcttgagccaccgc

SEQ ID NO: 81871 - DNA, 40 bp, Homo sapiens
gcggtggctcaagcctgtaatcccagcactttgggaggcc

SEQ ID NO: 81872 - DNA, 40 bp, Homo sapiens
gcctcccaaagtgctgggattacaggcttgagccaccgca

SEQ ID NO: 81873 - DNA, 40 bp, Homo sapiens
tgcggtggctcaagcctgtaatcccagcactttgggaggc

SEQ ID NO: 81874 - DNA, 40 bp, Homo sapiens
cctcccaaagtgctgggattacaggcttgagccaccgcac

SEQ ID NO: 81875 - DNA, 40 bp, Homo sapiens
gtgcggtggctcaagcctgtaatcccagcactttgggagg

SEQ ID NO: 81876 - DNA, 40 bp, Homo sapiens
ctcccaaagtgctgggattacaggcttgagccaccgcacc

SEQ ID NO: 81877 - DNA, 40 bp, Homo sapiens
ggtgcggtggctcaagcctgtaatcccagcactttgggag

SEQ ID NO: 81878 - DNA, 40 bp, Homo sapiens
tcccaaagtgctgggattacaggcttgagccaccgcaccc

SEQ ID NO: 81879 - DNA, 40 bp, Homo sapiens
gggtgcggtggctcaagcctgtaatcccagcactttggga

SEQ ID NO: 81880 - DNA, 40 bp, Homo sapiens
cccaaagtgctgggattacaggcttgagccaccgcacccc

SEQ ID NO: 81881 - DNA, 40 bp, Homo sapiens
ggggtgcggtggctcaagcctgtaatcccagcactttggg

SEQ ID NO: 81882 - DNA, 40 bp, Homo sapiens
ccaaagtgctgggattacaggcttgagccaccgcaccccg

SEQ ID NO: 81883 - DNA, 40 bp, Homo sapiens
cggggtgcggtggctcaagcctgtaatcccagcactttgg

SEQ ID NO: 81884 - DNA, 40 bp, Homo sapiens
caaagtgctgggattacaggcttgagccaccgcaccccgc

SEQ ID NO: 81885 - DNA, 40 bp, Homo sapiens
gcggggtgcggtggctcaagcctgtaatcccagcactttg

SEQ ID NO: 81886 - DNA, 40 bp, Homo sapiens
aaagtgctgggattacaggcttgagccaccgcaccccgcc

SEQ ID NO: 81887 - DNA, 40 bp, Homo sapiens
ggcggggtgcggtggctcaagcctgtaatcccagcacttt

SEQ ID NO: 81888 - DNA, 40 bp, Homo sapiens
aagtgctgggattacaggcttgagccaccgcaccccgccc

SEQ ID NO: 81889 - DNA, 40 bp, Homo sapiens
gggcggggtgcggtggctcaagcctgtaatcccagcactt

SEQ ID NO: 81890 - DNA, 40 bp, Homo sapiens
agtgctgggattacaggcttgagccaccgcaccccgccca

SEQ ID NO: 81891 - DNA, 40 bp, Homo sapiens
tgggcggggtgcggtggctcaagcctgtaatcccagcact

SEQ ID NO: 81892 - DNA, 40 bp, Homo sapiens
gtgctgggattacaggcttgagccaccgcaccccgcccac

SEQ ID NO: 81893 - DNA, 40 bp, Homo sapiens
gtgggcggggtgcggtggctcaagcctgtaatcccagcac

SEQ ID NO: 81894 - DNA, 40 bp, Homo sapiens
tgctgggattacaggcttgagccaccgcaccccgcccact

SEQ ID NO: 81895 - DNA, 40 bp, Homo sapiens
agtgggcggggtgcggtggctcaagcctgtaatcccagca

SEQ ID NO: 81896 - DNA, 40 bp, Homo sapiens
gctgggattacaggcttgagccaccgcaccccgcccactt

SEQ ID NO: 81897 - DNA, 40 bp, Homo sapiens
aagtgggcggggtgcggtggctcaagcctgtaatcccagc

SEQ ID NO: 81898 - DNA, 40 bp, Homo sapiens
ctgggattacaggcttgagccaccgcaccccgcccactta

SEQ ID NO: 81899 - DNA, 40 bp, Homo sapiens
taagtgggcggggtgcggtggctcaagcctgtaatcccag

SEQ ID NO: 81900 - DNA, 40 bp, Homo sapiens
tgggattacaggcttgagccaccgcaccccgcccacttaa

SEQ ID NO: 81901 - DNA, 40 bp, Homo sapiens
ttaagtgggcggggtgcggtggctcaagcctgtaatccca

SEQ ID NO: 81902 - DNA, 40 bp, Homo sapiens
gggattacaggcttgagccaccgcaccccgcccacttaac

SEQ ID NO: 81903 - DNA, 40 bp, Homo sapiens
gttaagtgggcggggtgcggtggctcaagcctgtaatccc

SEQ ID NO: 81904 - DNA, 40 bp, Homo sapiens
ggattacaggcttgagccaccgcaccccgcccacttaaca

SEQ ID NO: 81905 - DNA, 40 bp, Homo sapiens
tgttaagtgggcggggtgcggtggctcaagcctgtaatcc

SEQ ID NO: 81906 - DNA, 40 bp, Homo sapiens
gattacaggcttgagccaccgcaccccgcccacttaacat

SEQ ID NO: 81907 - DNA, 40 bp, Homo sapiens
atgttaagtgggcggggtgcggtggctcaagcctgtaatc

SEQ ID NO: 81908 - DNA, 40 bp, Homo sapiens
attacaggcttgagccaccgcaccccgcccacttaacatt

SEQ ID NO: 81909 - DNA, 40 bp, Homo sapiens
aatgttaagtgggcggggtgcggtggctcaagcctgtaat

SEQ ID NO: 81910 - DNA, 40 bp, Homo sapiens
ttacaggcttgagccaccgcaccccgcccacttaacattt

SEQ ID NO: 81911 - DNA, 40 bp, Homo sapiens
aaatgttaagtgggcggggtgcggtggctcaagcctgtaa

SEQ ID NO: 81912 - DNA, 40 bp, Homo sapiens
tacaggcttgagccaccgcaccccgcccacttaacatttt

SEQ ID NO: 81913 - DNA, 40 bp, Homo sapiens
aaaatgttaagtgggcggggtgcggtggctcaagcctgta

SEQ ID NO: 81914 - DNA, 40 bp, Homo sapiens
acaggcttgagccaccgcaccccgcccacttaacatttta

SEQ ID NO: 81915 - DNA, 40 bp, Homo sapiens
taaaatgttaagtgggcggggtgcggtggctcaagcctgt

SEQ ID NO: 81916 - DNA, 40 bp, Homo sapiens
caggcttgagccaccgcaccccgcccacttaacattttaa

SEQ ID NO: 81917 - DNA, 40 bp, Homo sapiens
ttaaaatgttaagtgggcggggtgcggtggctcaagcctg

SEQ ID NO: 81918 - DNA, 40 bp, Homo sapiens
aggcttgagccaccgcaccccgcccacttaacattttaaa

SEQ ID NO: 81919 - DNA, 40 bp, Homo sapiens
tttaaaatgttaagtgggcggggtgcggtggctcaagcct

SEQ ID NO: 81920 - DNA, 40 bp, Homo sapiens
ggcttgagccaccgcaccccgcccacttaacattttaaat

SEQ ID NO: 81921 - DNA, 40 bp, Homo sapiens
atttaaaatgttaagtgggcggggtgcggtggctcaagcc

SEQ ID NO: 81922 - DNA, 40 bp, Homo sapiens
gcttgagccaccgcaccccgcccacttaacattttaaatt

SEQ ID NO: 81923 - DNA, 40 bp, Homo sapiens
aatttaaaatgttaagtgggcggggtgcggtggctcaagc

SEQ ID NO: 81924 - DNA, 40 bp, Homo sapiens
cttgagccaccgcaccccgcccacttaacattttaaatta

SEQ ID NO: 81925 - DNA, 40 bp, Homo sapiens
taatttaaaatgttaagtgggcggggtgcggtggctcaag

SEQ ID NO: 81926 - DNA, 40 bp, Homo sapiens
ttgagccaccgcaccccgcccacttaacattttaaattaa

SEQ ID NO: 81927 - DNA, 40 bp, Homo sapiens
ttaatttaaaatgttaagtgggcggggtgcggtggctcaa

SEQ ID NO: 81928 - DNA, 40 bp, Homo sapiens
tgagccaccgcaccccgcccacttaacattttaaattaat

SEQ ID NO: 81929 - DNA, 40 bp, Homo sapiens
attaatttaaaatgttaagtgggcggggtgcggtggctca

SEQ ID NO: 81930 - DNA, 40 bp, Homo sapiens
gagccaccgcaccccgcccacttaacattttaaattaatt

SEQ ID NO: 81931 - DNA, 40 bp, Homo sapiens
aattaatttaaaatgttaagtgggcggggtgcggtggctc

SEQ ID NO: 81932 - DNA, 40 bp, Homo sapiens
agccaccgcaccccgcccacttaacattttaaattaattt

SEQ ID NO: 81933 - DNA, 40 bp, Homo sapiens
aaattaatttaaaatgttaagtgggcggggtgcggtggct

SEQ ID NO: 81934 - DNA, 40 bp, Homo sapiens
gccaccgcaccccgcccacttaacattttaaattaatttc

SEQ ID NO: 81935 - DNA, 40 bp, Homo sapiens
gaaattaatttaaaatgttaagtgggcggggtgcggtggc

SEQ ID NO: 81936 - DNA, 40 bp, Homo sapiens
ccaccgcaccccgcccacttaacattttaaattaatttca

SEQ ID NO: 81937 - DNA, 40 bp, Homo sapiens
tgaaattaatttaaaatgttaagtgggcggggtgcggtgg

SEQ ID NO: 81938 - DNA, 40 bp, Homo sapiens
caccgcaccccgcccacttaacattttaaattaatttcaa

SEQ ID NO: 81939 - DNA, 40 bp, Homo sapiens
ttgaaattaatttaaaatgttaagtgggcggggtgcggtg

SEQ ID NO: 81940 - DNA, 40 bp, Homo sapiens
accgcaccccgcccacttaacattttaaattaatttcaag

SEQ ID NO: 81941 - DNA, 40 bp, Homo sapiens
cttgaaattaatttaaaatgttaagtgggcggggtgcggt

SEQ ID NO: 81942 - DNA, 40 bp, Homo sapiens
ccgcaccccgcccacttaacattttaaattaatttcaaga

SEQ ID NO: 81943 - DNA, 40 bp, Homo sapiens
tcttgaaattaatttaaaatgttaagtgggcggggtgcgg

SEQ ID NO: 81944 - DNA, 40 bp, Homo sapiens
cgcaccccgcccacttaacattttaaattaatttcaagat

SEQ ID NO: 81945 - DNA, 40 bp, Homo sapiens
atcttgaaattaatttaaaatgttaagtgggcggggtgcg

SEQ ID NO: 81946 - DNA, 40 bp, Homo sapiens
gcaccccgcccacttaacattttaaattaatttcaagata

SEQ ID NO: 81947 - DNA, 40 bp, Homo sapiens
tatcttgaaattaatttaaaatgttaagtgggcggggtgc

SEQ ID NO: 81948 - DNA, 40 bp, Homo sapiens
caccccgcccacttaacattttaaattaatttcaagataa

SEQ ID NO: 81949 - DNA, 40 bp, Homo sapiens
ttatcttgaaattaatttaaaatgttaagtgggcggggtg

SEQ ID NO: 81950 - DNA, 40 bp, Homo sapiens
accccgcccacttaacattttaaattaatttcaagataat

SEQ ID NO: 81951 - DNA, 40 bp, Homo sapiens
attatcttgaaattaatttaaaatgttaagtgggcggggt

SEQ ID NO: 81952 - DNA, 40 bp, Homo sapiens
ccccgcccacttaacattttaaattaatttcaagataata

SEQ ID NO: 81953 - DNA, 40 bp, Homo sapiens
tattatcttgaaattaatttaaaatgttaagtgggcgggg

SEQ ID NO: 81954 - DNA, 40 bp, Homo sapiens
cccgcccacttaacattttaaattaatttcaagataatat

SEQ ID NO: 81955 - DNA, 40 bp, Homo sapiens
atattatcttgaaattaatttaaaatgttaagtgggcggg

SEQ ID NO: 81956 - DNA, 40 bp, Homo sapiens
ccgcccacttaacattttaaattaatttcaagataatatc

SEQ ID NO: 81957 - DNA, 40 bp, Homo sapiens
gatattatcttgaaattaatttaaaatgttaagtgggcgg

SEQ ID NO: 81958 - DNA, 40 bp, Homo sapiens
cgcccacttaacattttaaattaatttcaagataatatca

SEQ ID NO: 81959 - DNA, 40 bp, Homo sapiens
tgatattatcttgaaattaatttaaaatgttaagtgggcg

SEQ ID NO: 81960 - DNA, 40 bp, Homo sapiens
gcccacttaacattttaaattaatttcaagataatatcac

SEQ ID NO: 81961 - DNA, 40 bp, Homo sapiens
gtgatattatcttgaaattaatttaaaatgttaagtgggc

SEQ ID NO: 81962 - DNA, 40 bp, Homo sapiens
cccacttaacattttaaattaatttcaagataatatcact

SEQ ID NO: 81963 - DNA, 40 bp, Homo sapiens
agtgatattatcttgaaattaatttaaaatgttaagtggg

SEQ ID NO: 81964 - DNA, 40 bp, Homo sapiens
ccacttaacattttaaattaatttcaagataatatcactt

SEQ ID NO: 81965 - DNA, 40 bp, Homo sapiens
aagtgatattatcttgaaattaatttaaaatgttaagtgg

SEQ ID NO: 81966 - DNA, 40 bp, Homo sapiens
cacttaacattttaaattaatttcaagataatatcacttg

SEQ ID NO: 81967 - DNA, 40 bp, Homo sapiens
caagtgatattatcttgaaattaatttaaaatgttaagtg

SEQ ID NO: 81968 - DNA, 40 bp, Homo sapiens
acttaacattttaaattaatttcaagataatatcacttga

SEQ ID NO: 81969 - DNA, 40 bp, Homo sapiens
tcaagtgatattatcttgaaattaatttaaaatgttaagt

SEQ ID NO: 81970 - DNA, 40 bp, Homo sapiens
cttaacattttaaattaatttcaagataatatcacttgaa

SEQ ID NO: 81971 - DNA, 40 bp, Homo sapiens
ttcaagtgatattatcttgaaattaatttaaaatgttaag

SEQ ID NO: 81972 - DNA, 40 bp, Homo sapiens
ttaacattttaaattaatttcaagataatatcacttgaat

SEQ ID NO: 81973 - DNA, 40 bp, Homo sapiens
attcaagtgatattatcttgaaattaatttaaaatgttaa

SEQ ID NO: 81974 - DNA, 40 bp, Homo sapiens
taacattttaaattaatttcaagataatatcacttgaata

SEQ ID NO: 81975 - DNA, 40 bp, Homo sapiens
tattcaagtgatattatcttgaaattaatttaaaatgtta

SEQ ID NO: 81976 - DNA, 40 bp, Homo sapiens
aacattttaaattaatttcaagataatatcacttgaatat

SEQ ID NO: 81977 - DNA, 40 bp, Homo sapiens
atattcaagtgatattatcttgaaattaatttaaaatgtt

SEQ ID NO: 81978 - DNA, 40 bp, Homo sapiens
acattttaaattaatttcaagataatatcacttgaatatt

SEQ ID NO: 81979 - DNA, 40 bp, Homo sapiens
aatattcaagtgatattatcttgaaattaatttaaaatgt

SEQ ID NO: 81980 - DNA, 40 bp, Homo sapiens
cattttaaattaatttcaagataatatcacttgaatattt

SEQ ID NO: 81981 - DNA, 40 bp, Homo sapiens
aaatattcaagtgatattatcttgaaattaatttaaaatg

SEQ ID NO: 81982 - DNA, 40 bp, Homo sapiens
attttaaattaatttcaagataatatcacttgaatatttt

SEQ ID NO: 81983 - DNA, 40 bp, Homo sapiens
aaaatattcaagtgatattatcttgaaattaatttaaaat

SEQ ID NO: 81984 - DNA, 40 bp, Homo sapiens
ttttaaattaatttcaagataatatcacttgaatattttt

SEQ ID NO: 81985 - DNA, 40 bp, Homo sapiens
aaaaatattcaagtgatattatcttgaaattaatttaaaa

SEQ ID NO: 81986 - DNA, 40 bp, Homo sapiens
tttaaattaatttcaagataatatcacttgaatattttta

SEQ ID NO: 81987 - DNA, 40 bp, Homo sapiens
taaaaatattcaagtgatattatcttgaaattaatttaaa

SEQ ID NO: 81988 - DNA, 40 bp, Homo sapiens
ttaaattaatttcaagataatatcacttgaatatttttac

SEQ ID NO: 81989 - DNA, 40 bp, Homo sapiens
gtaaaaatattcaagtgatattatcttgaaattaatttaa

SEQ ID NO: 81990 - DNA, 40 bp, Homo sapiens
taaattaatttcaagataatatcacttgaatatttttaca

SEQ ID NO: 81991 - DNA, 40 bp, Homo sapiens
tgtaaaaatattcaagtgatattatcttgaaattaattta

SEQ ID NO: 81992 - DNA, 40 bp, Homo sapiens
aaattaatttcaagataatatcacttgaatatttttacac

SEQ ID NO: 81993 - DNA, 40 bp, Homo sapiens
gtgtaaaaatattcaagtgatattatcttgaaattaattt

SEQ ID NO: 81994 - DNA, 40 bp, Homo sapiens
aattaatttcaagataatatcacttgaatatttttacaca

SEQ ID NO: 81995 - DNA, 40 bp, Homo sapiens
tgtgtaaaaatattcaagtgatattatcttgaaattaatt

SEQ ID NO: 81996 - DNA, 40 bp, Homo sapiens
attaatttcaagataatatcacttgaatatttttacacat

SEQ ID NO: 81997 - DNA, 40 bp, Homo sapiens
atgtgtaaaaatattcaagtgatattatcttgaaattaat

SEQ ID NO: 81998 - DNA, 40 bp, Homo sapiens
ttaatttcaagataatatcacttgaatatttttacacata

SEQ ID NO: 81999 - DNA, 40 bp, Homo sapiens
tatgtgtaaaaatattcaagtgatattatcttgaaattaa

SEQ ID NO: 82000 - DNA, 40 bp, Homo sapiens
taatttcaagataatatcacttgaatatttttacacatat

SEQ ID NO: 82001 - DNA, 40 bp, Homo sapiens
atatgtgtaaaaatattcaagtgatattatcttgaaatta

SEQ ID NO: 82002 - DNA, 40 bp, Homo sapiens
aatttcaagataatatcacttgaatatttttacacatata

SEQ ID NO: 82003 - DNA, 40 bp, Homo sapiens
tatatgtgtaaaaatattcaagtgatattatcttgaaatt

SEQ ID NO: 82004 - DNA, 40 bp, Homo sapiens
atttcaagataatatcacttgaatatttttacacatataa

SEQ ID NO: 82005 - DNA, 40 bp, Homo sapiens
ttatatgtgtaaaaatattcaagtgatattatcttgaaat

SEQ ID NO: 82006 - DNA, 40 bp, Homo sapiens
tttcaagataatatcacttgaatatttttacacatataat

SEQ ID NO: 82007 - DNA, 40 bp, Homo sapiens
attatatgtgtaaaaatattcaagtgatattatcttgaaa

SEQ ID NO: 82008 - DNA, 40 bp, Homo sapiens
ttcaagataatatcacttgaatatttttacacatataatt

SEQ ID NO: 82009 - DNA, 40 bp, Homo sapiens
aattatatgtgtaaaaatattcaagtgatattatcttgaa

SEQ ID NO: 82010 - DNA, 40 bp, Homo sapiens
tcaagataatatcacttgaatatttttacacatataattt

SEQ ID NO: 82011 - DNA, 40 bp, Homo sapiens
aaattatatgtgtaaaaatattcaagtgatattatcttga

SEQ ID NO: 82012 - DNA, 40 bp, Homo sapiens
caagataatatcacttgaatatttttacacatataatttt

SEQ ID NO: 82013 - DNA, 40 bp, Homo sapiens
aaaattatatgtgtaaaaatattcaagtgatattatcttg

SEQ ID NO: 82014 - DNA, 40 bp, Homo sapiens
aagataatatcacttgaatatttttacacatataattttt

SEQ ID NO: 82015 - DNA, 40 bp, Homo sapiens
aaaaattatatgtgtaaaaatattcaagtgatattatctt

SEQ ID NO: 82016 - DNA, 40 bp, Homo sapiens
agataatatcacttgaatatttttacacatataatttttt

SEQ ID NO: 82017 - DNA, 40 bp, Homo sapiens
aaaaaattatatgtgtaaaaatattcaagtgatattatct

SEQ ID NO: 82018 - DNA, 40 bp, Homo sapiens
gataatatcacttgaatatttttacacatataattttttt

SEQ ID NO: 82019 - DNA, 40 bp, Homo sapiens
aaaaaaattatatgtgtaaaaatattcaagtgatattatc

SEQ ID NO: 82020 - DNA, 40 bp, Homo sapiens
ataatatcacttgaatatttttacacatataattttttta

SEQ ID NO: 82021 - DNA, 40 bp, Homo sapiens
taaaaaaattatatgtgtaaaaatattcaagtgatattat

SEQ ID NO: 82022 - DNA, 40 bp, Homo sapiens
taatatcacttgaatatttttacacatataatttttttaa

SEQ ID NO: 82023 - DNA, 40 bp, Homo sapiens
ttaaaaaaattatatgtgtaaaaatattcaagtgatatta

SEQ ID NO: 82024 - DNA, 40 bp, Homo sapiens
aatatcacttgaatatttttacacatataatttttttaat

SEQ ID NO: 82025 - DNA, 40 bp, Homo sapiens
attaaaaaaattatatgtgtaaaaatattcaagtgatatt

SEQ ID NO: 82026 - DNA, 40 bp, Homo sapiens
atatcacttgaatatttttacacatataatttttttaata

SEQ ID NO: 82027 - DNA, 40 bp, Homo sapiens
tattaaaaaaattatatgtgtaaaaatattcaagtgatat

SEQ ID NO: 82028 - DNA, 40 bp, Homo sapiens
tatcacttgaatatttttacacatataatttttttaatac

SEQ ID NO: 82029 - DNA, 40 bp, Homo sapiens
gtattaaaaaaattatatgtgtaaaaatattcaagtgata

SEQ ID NO: 82030 - DNA, 40 bp, Homo sapiens
atcacttgaatatttttacacatataatttttttaataca

SEQ ID NO: 82031 - DNA, 40 bp, Homo sapiens
tgtattaaaaaaattatatgtgtaaaaatattcaagtgat

SEQ ID NO: 82032 - DNA, 40 bp, Homo sapiens
tcacttgaatatttttacacatataatttttttaatacat

SEQ ID NO: 82033 - DNA, 40 bp, Homo sapiens
atgtattaaaaaaattatatgtgtaaaaatattcaagtga

SEQ ID NO: 82034 - DNA, 40 bp, Homo sapiens
cacttgaatatttttacacatataatttttttaatacatt

SEQ ID NO: 82035 - DNA, 40 bp, Homo sapiens
aatgtattaaaaaaattatatgtgtaaaaatattcaagtg

SEQ ID NO: 82036 - DNA, 40 bp, Homo sapiens
acttgaatatttttacacatataatttttttaatacattt

SEQ ID NO: 82037 - DNA, 40 bp, Homo sapiens
aaatgtattaaaaaaattatatgtgtaaaaatattcaagt

SEQ ID NO: 82038 - DNA, 40 bp, Homo sapiens
cttgaatatttttacacatataatttttttaatacattta

SEQ ID NO: 82039 - DNA, 40 bp, Homo sapiens
taaatgtattaaaaaaattatatgtgtaaaaatattcaag

SEQ ID NO: 82040 - DNA, 40 bp, Homo sapiens
ttgaatatttttacacatataatttttttaatacatttat

SEQ ID NO: 82041 - DNA, 40 bp, Homo sapiens
ataaatgtattaaaaaaattatatgtgtaaaaatattcaa

SEQ ID NO: 82042 - DNA, 40 bp, Homo sapiens
tgaatatttttacacatataatttttttaatacatttatt

SEQ ID NO: 82043 - DNA, 40 bp, Homo sapiens
aataaatgtattaaaaaaattatatgtgtaaaaatattca

SEQ ID NO: 82044 - DNA, 40 bp, Homo sapiens
gaatatttttacacatataatttttttaatacatttattt

SEQ ID NO: 82045 - DNA, 40 bp, Homo sapiens
aaataaatgtattaaaaaaattatatgtgtaaaaatattc

SEQ ID NO: 82046 - DNA, 40 bp, Homo sapiens
aatatttttacacatataatttttttaatacatttattta

SEQ ID NO: 82047 - DNA, 40 bp, Homo sapiens
taaataaatgtattaaaaaaattatatgtgtaaaaatatt

SEQ ID NO: 82048 - DNA, 40 bp, Homo sapiens
atatttttacacatataatttttttaatacatttatttac

SEQ ID NO: 82049 - DNA, 40 bp, Homo sapiens
gtaaataaatgtattaaaaaaattatatgtgtaaaaatat

SEQ ID NO: 82050 - DNA, 40 bp, Homo sapiens
tatttttacacatataatttttttaatacatttatttaca

SEQ ID NO: 82051 - DNA, 40 bp, Homo sapiens
tgtaaataaatgtattaaaaaaattatatgtgtaaaaata

SEQ ID NO: 82052 - DNA, 40 bp, Homo sapiens
atttttacacatataatttttttaatacatttatttacac

SEQ ID NO: 82053 - DNA, 40 bp, Homo sapiens
gtgtaaataaatgtattaaaaaaattatatgtgtaaaaat

SEQ ID NO: 82054 - DNA, 40 bp, Homo sapiens
tttttacacatataatttttttaatacatttatttacaca

SEQ ID NO: 82055 - DNA, 40 bp, Homo sapiens
tgtgtaaataaatgtattaaaaaaattatatgtgtaaaaa

SEQ ID NO: 82056 - DNA, 40 bp, Homo sapiens
ttttacacatataatttttttaatacatttatttacacag

SEQ ID NO: 82057 - DNA, 40 bp, Homo sapiens
ctgtgtaaataaatgtattaaaaaaattatatgtgtaaaa

SEQ ID NO: 82058 - DNA, 40 bp, Homo sapiens
tttacacatataatttttttaatacatttatttacacagt

SEQ ID NO: 82059 - DNA, 40 bp, Homo sapiens
actgtgtaaataaatgtattaaaaaaattatatgtgtaaa

SEQ ID NO: 82060 - DNA, 40 bp, Homo sapiens
ttacacatataatttttttaatacatttatttacacagtt

SEQ ID NO: 82061 - DNA, 40 bp, Homo sapiens
aactgtgtaaataaatgtattaaaaaaattatatgtgtaa

SEQ ID NO: 82062 - DNA, 40 bp, Homo sapiens
tacacatataatttttttaatacatttatttacacagttt

SEQ ID NO: 82063 - DNA, 40 bp, Homo sapiens
aaactgtgtaaataaatgtattaaaaaaattatatgtgta

SEQ ID NO: 82064 - DNA, 40 bp, Homo sapiens
acacatataatttttttaatacatttatttacacagttta

SEQ ID NO: 82065 - DNA, 40 bp, Homo sapiens
taaactgtgtaaataaatgtattaaaaaaattatatgtgt

SEQ ID NO: 82066 - DNA, 40 bp, Homo sapiens
cacatataatttttttaatacatttatttacacagtttat

SEQ ID NO: 82067 - DNA, 40 bp, Homo sapiens
ataaactgtgtaaataaatgtattaaaaaaattatatgtg

SEQ ID NO: 82068 - DNA, 40 bp, Homo sapiens
acatataatttttttaatacatttatttacacagtttata

SEQ ID NO: 82069 - DNA, 40 bp, Homo sapiens
tataaactgtgtaaataaatgtattaaaaaaattatatgt

SEQ ID NO: 82070 - DNA, 40 bp, Homo sapiens
catataatttttttaatacatttatttacacagtttataa

SEQ ID NO: 82071 - DNA, 40 bp, Homo sapiens
ttataaactgtgtaaataaatgtattaaaaaaattatatg

SEQ ID NO: 82072 - DNA, 40 bp, Homo sapiens
atataatttttttaatacatttatttacacagtttataat

SEQ ID NO: 82073 - DNA, 40 bp, Homo sapiens
attataaactgtgtaaataaatgtattaaaaaaattatat

SEQ ID NO: 82074 - DNA, 40 bp, Homo sapiens
tataatttttttaatacatttatttacacagtttataata

SEQ ID NO: 82075 - DNA, 40 bp, Homo sapiens
tattataaactgtgtaaataaatgtattaaaaaaattata

SEQ ID NO: 82076 - DNA, 40 bp, Homo sapiens
ataatttttttaatacatttatttacacagtttataatat

SEQ ID NO: 82077 - DNA, 40 bp, Homo sapiens
atattataaactgtgtaaataaatgtattaaaaaaattat

SEQ ID NO: 82078 - DNA, 40 bp, Homo sapiens
taatttttttaatacatttatttacacagtttataatatc

SEQ ID NO: 82079 - DNA, 40 bp, Homo sapiens
gatattataaactgtgtaaataaatgtattaaaaaaatta

SEQ ID NO: 82080 - DNA, 40 bp, Homo sapiens
aatttttttaatacatttatttacacagtttataatatcc

SEQ ID NO: 82081 - DNA, 40 bp, Homo sapiens
ggatattataaactgtgtaaataaatgtattaaaaaaatt

SEQ ID NO: 82082 - DNA, 40 bp, Homo sapiens
atttttttaatacatttatttacacagtttataatatcct

SEQ ID NO: 82083 - DNA, 40 bp, Homo sapiens
aggatattataaactgtgtaaataaatgtattaaaaaaat

SEQ ID NO: 82084 - DNA, 40 bp, Homo sapiens
tttttttaatacatttatttacacagtttataatatccta

SEQ ID NO: 82085 - DNA, 40 bp, Homo sapiens
taggatattataaactgtgtaaataaatgtattaaaaaaa

SEQ ID NO: 82086 - DNA, 40 bp, Homo sapiens
ttttttaatacatttatttacacagtttataatatcctac

SEQ ID NO: 82087 - DNA, 40 bp, Homo sapiens
gtaggatattataaactgtgtaaataaatgtattaaaaaa

SEQ ID NO: 82088 - DNA, 40 bp, Homo sapiens
tttttaatacatttatttacacagtttataatatcctaca

SEQ ID NO: 82089 - DNA, 40 bp, Homo sapiens
tgtaggatattataaactgtgtaaataaatgtattaaaaa

SEQ ID NO: 82090 - DNA, 40 bp, Homo sapiens
ttttaatacatttatttacacagtttataatatcctacaa

SEQ ID NO: 82091 - DNA, 40 bp, Homo sapiens
ttgtaggatattataaactgtgtaaataaatgtattaaaa

SEQ ID NO: 82092 - DNA, 40 bp, Homo sapiens
tttaatacatttatttacacagtttataatatcctacaaa

SEQ ID NO: 82093 - DNA, 40 bp, Homo sapiens
tttgtaggatattataaactgtgtaaataaatgtattaaa

SEQ ID NO: 82094 - DNA, 40 bp, Homo sapiens
ttaatacatttatttacacagtttataatatcctacaaag

SEQ ID NO: 82095 - DNA, 40 bp, Homo sapiens
ctttgtaggatattataaactgtgtaaataaatgtattaa

SEQ ID NO: 82096 - DNA, 40 bp, Homo sapiens
taatacatttatttacacagtttataatatcctacaaagt

SEQ ID NO: 82097 - DNA, 40 bp, Homo sapiens
actttgtaggatattataaactgtgtaaataaatgtatta

SEQ ID NO: 82098 - DNA, 40 bp, Homo sapiens
aatacatttatttacacagtttataatatcctacaaagtg

SEQ ID NO: 82099 - DNA, 40 bp, Homo sapiens
cactttgtaggatattataaactgtgtaaataaatgtatt

SEQ ID NO: 82100 - DNA, 40 bp, Homo sapiens
atacatttatttacacagtttataatatcctacaaagtga

SEQ ID NO: 82101 - DNA, 40 bp, Homo sapiens
tcactttgtaggatattataaactgtgtaaataaatgtat

SEQ ID NO: 82102 - DNA, 40 bp, Homo sapiens
tacatttatttacacagtttataatatcctacaaagtgat

SEQ ID NO: 82103 - DNA, 40 bp, Homo sapiens
atcactttgtaggatattataaactgtgtaaataaatgta

SEQ ID NO: 82104 - DNA, 40 bp, Homo sapiens
acatttatttacacagtttataatatcctacaaagtgatt

SEQ ID NO: 82105 - DNA, 40 bp, Homo sapiens
aatcactttgtaggatattataaactgtgtaaataaatgt

SEQ ID NO: 82106 - DNA, 40 bp, Homo sapiens
catttatttacacagtttataatatcctacaaagtgatta

SEQ ID NO: 82107 - DNA, 40 bp, Homo sapiens
taatcactttgtaggatattataaactgtgtaaataaatg

SEQ ID NO: 82108 - DNA, 40 bp, Homo sapiens
atttatttacacagtttataatatcctacaaagtgattac

SEQ ID NO: 82109 - DNA, 40 bp, Homo sapiens
gtaatcactttgtaggatattataaactgtgtaaataaat

SEQ ID NO: 82110 - DNA, 40 bp, Homo sapiens
tttatttacacagtttataatatcctacaaagtgattaca

SEQ ID NO: 82111 - DNA, 40 bp, Homo sapiens
tgtaatcactttgtaggatattataaactgtgtaaataaa

SEQ ID NO: 82112 - DNA, 40 bp, Homo sapiens
ttatttacacagtttataatatcctacaaagtgattacaa

SEQ ID NO: 82113 - DNA, 40 bp, Homo sapiens
ttgtaatcactttgtaggatattataaactgtgtaaataa

SEQ ID NO: 82114 - DNA, 40 bp, Homo sapiens
tatttacacagtttataatatcctacaaagtgattacaat

SEQ ID NO: 82115 - DNA, 40 bp, Homo sapiens
attgtaatcactttgtaggatattataaactgtgtaaata

SEQ ID NO: 82116 - DNA, 40 bp, Homo sapiens
atttacacagtttataatatcctacaaagtgattacaatg

SEQ ID NO: 82117 - DNA, 40 bp, Homo sapiens
cattgtaatcactttgtaggatattataaactgtgtaaat

SEQ ID NO: 82118 - DNA, 40 bp, Homo sapiens
tttacacagtttataatatcctacaaagtgattacaatga

SEQ ID NO: 82119 - DNA, 40 bp, Homo sapiens
tcattgtaatcactttgtaggatattataaactgtgtaaa

SEQ ID NO: 82120 - DNA, 40 bp, Homo sapiens
ttacacagtttataatatcctacaaagtgattacaatgag

SEQ ID NO: 82121 - DNA, 40 bp, Homo sapiens
ctcattgtaatcactttgtaggatattataaactgtgtaa

SEQ ID NO: 82122 - DNA, 40 bp, Homo sapiens
tacacagtttataatatcctacaaagtgattacaatgagt

SEQ ID NO: 82123 - DNA, 40 bp, Homo sapiens
actcattgtaatcactttgtaggatattataaactgtgta

SEQ ID NO: 82124 - DNA, 40 bp, Homo sapiens
acacagtttataatatcctacaaagtgattacaatgagta

SEQ ID NO: 82125 - DNA, 40 bp, Homo sapiens
tactcattgtaatcactttgtaggatattataaactgtgt

SEQ ID NO: 82126 - DNA, 40 bp, Homo sapiens
cacagtttataatatcctacaaagtgattacaatgagtaa

SEQ ID NO: 82127 - DNA, 40 bp, Homo sapiens
ttactcattgtaatcactttgtaggatattataaactgtg

SEQ ID NO: 82128 - DNA, 40 bp, Homo sapiens
acagtttataatatcctacaaagtgattacaatgagtaaa

SEQ ID NO: 82129 - DNA, 40 bp, Homo sapiens
tttactcattgtaatcactttgtaggatattataaactgt

SEQ ID NO: 82130 - DNA, 40 bp, Homo sapiens
cagtttataatatcctacaaagtgattacaatgagtaaaa

SEQ ID NO: 82131 - DNA, 40 bp, Homo sapiens
ttttactcattgtaatcactttgtaggatattataaactg

SEQ ID NO: 82132 - DNA, 40 bp, Homo sapiens
agtttataatatcctacaaagtgattacaatgagtaaaaa

SEQ ID NO: 82133 - DNA, 40 bp, Homo sapiens
tttttactcattgtaatcactttgtaggatattataaact

SEQ ID NO: 82134 - DNA, 40 bp, Homo sapiens
gtttataatatcctacaaagtgattacaatgagtaaaaac

SEQ ID NO: 82135 - DNA, 40 bp, Homo sapiens
gtttttactcattgtaatcactttgtaggatattataaac

SEQ ID NO: 82136 - DNA, 40 bp, Homo sapiens
tttataatatcctacaaagtgattacaatgagtaaaaacc

SEQ ID NO: 82137 - DNA, 40 bp, Homo sapiens
ggtttttactcattgtaatcactttgtaggatattataaa

SEQ ID NO: 82138 - DNA, 40 bp, Homo sapiens
ttataatatcctacaaagtgattacaatgagtaaaaaccc

SEQ ID NO: 82139 - DNA, 40 bp, Homo sapiens
gggtttttactcattgtaatcactttgtaggatattataa

SEQ ID NO: 82140 - DNA, 40 bp, Homo sapiens
tataatatcctacaaagtgattacaatgagtaaaaaccca

SEQ ID NO: 82141 - DNA, 40 bp, Homo sapiens
tgggtttttactcattgtaatcactttgtaggatattata

SEQ ID NO: 82142 - DNA, 40 bp, Homo sapiens
ataatatcctacaaagtgattacaatgagtaaaaacccag

SEQ ID NO: 82143 - DNA, 40 bp, Homo sapiens
ctgggtttttactcattgtaatcactttgtaggatattat

SEQ ID NO: 82144 - DNA, 40 bp, Homo sapiens
taatatcctacaaagtgattacaatgagtaaaaacccagt

SEQ ID NO: 82145 - DNA, 40 bp, Homo sapiens
actgggtttttactcattgtaatcactttgtaggatatta

SEQ ID NO: 82146 - DNA, 40 bp, Homo sapiens
aatatcctacaaagtgattacaatgagtaaaaacccagtt

SEQ ID NO: 82147 - DNA, 40 bp, Homo sapiens
aactgggtttttactcattgtaatcactttgtaggatatt

SEQ ID NO: 82148 - DNA, 40 bp, Homo sapiens
atatcctacaaagtgattacaatgagtaaaaacccagttt

SEQ ID NO: 82149 - DNA, 40 bp, Homo sapiens
aaactgggtttttactcattgtaatcactttgtaggatat

SEQ ID NO: 82150 - DNA, 40 bp, Homo sapiens
tatcctacaaagtgattacaatgagtaaaaacccagtttt

SEQ ID NO: 82151 - DNA, 40 bp, Homo sapiens
aaaactgggtttttactcattgtaatcactttgtaggata

SEQ ID NO: 82152 - DNA, 40 bp, Homo sapiens
atcctacaaagtgattacaatgagtaaaaacccagttttc

SEQ ID NO: 82153 - DNA, 40 bp, Homo sapiens
gaaaactgggtttttactcattgtaatcactttgtaggat

SEQ ID NO: 82154 - DNA, 40 bp, Homo sapiens
tcctacaaagtgattacaatgagtaaaaacccagttttca

SEQ ID NO: 82155 - DNA, 40 bp, Homo sapiens
tgaaaactgggtttttactcattgtaatcactttgtagga

SEQ ID NO: 82156 - DNA, 40 bp, Homo sapiens
cctacaaagtgattacaatgagtaaaaacccagttttcat

SEQ ID NO: 82157 - DNA, 40 bp, Homo sapiens
atgaaaactgggtttttactcattgtaatcactttgtagg

SEQ ID NO: 82158 - DNA, 40 bp, Homo sapiens
ctacaaagtgattacaatgagtaaaaacccagttttcatt

SEQ ID NO: 82159 - DNA, 40 bp, Homo sapiens
aatgaaaactgggtttttactcattgtaatcactttgtag

SEQ ID NO: 82160 - DNA, 40 bp, Homo sapiens
tacaaagtgattacaatgagtaaaaacccagttttcattg

SEQ ID NO: 82161 - DNA, 40 bp, Homo sapiens
caatgaaaactgggtttttactcattgtaatcactttgta

SEQ ID NO: 82162 - DNA, 40 bp, Homo sapiens
acaaagtgattacaatgagtaaaaacccagttttcattgt

SEQ ID NO: 82163 - DNA, 40 bp, Homo sapiens
acaatgaaaactgggtttttactcattgtaatcactttgt

SEQ ID NO: 82164 - DNA, 40 bp, Homo sapiens
caaagtgattacaatgagtaaaaacccagttttcattgtt

SEQ ID NO: 82165 - DNA, 40 bp, Homo sapiens
aacaatgaaaactgggtttttactcattgtaatcactttg

SEQ ID NO: 82166 - DNA, 40 bp, Homo sapiens
aaagtgattacaatgagtaaaaacccagttttcattgttc

SEQ ID NO: 82167 - DNA, 40 bp, Homo sapiens
gaacaatgaaaactgggtttttactcattgtaatcacttt

SEQ ID NO: 82168 - DNA, 40 bp, Homo sapiens
aagtgattacaatgagtaaaaacccagttttcattgttcc

SEQ ID NO: 82169 - DNA, 40 bp, Homo sapiens
ggaacaatgaaaactgggtttttactcattgtaatcactt

SEQ ID NO: 82170 - DNA, 40 bp, Homo sapiens
agtgattacaatgagtaaaaacccagttttcattgttcct

SEQ ID NO: 82171 - DNA, 40 bp, Homo sapiens
aggaacaatgaaaactgggtttttactcattgtaatcact

SEQ ID NO: 82172 - DNA, 40 bp, Homo sapiens
gtgattacaatgagtaaaaacccagttttcattgttccta

SEQ ID NO: 82173 - DNA, 40 bp, Homo sapiens
taggaacaatgaaaactgggtttttactcattgtaatcac

SEQ ID NO: 82174 - DNA, 40 bp, Homo sapiens
tgattacaatgagtaaaaacccagttttcattgttcctaa

SEQ ID NO: 82175 - DNA, 40 bp, Homo sapiens
ttaggaacaatgaaaactgggtttttactcattgtaatca

SEQ ID NO: 82176 - DNA, 40 bp, Homo sapiens
gattacaatgagtaaaaacccagttttcattgttcctaaa

SEQ ID NO: 82177 - DNA, 40 bp, Homo sapiens
tttaggaacaatgaaaactgggtttttactcattgtaatc

SEQ ID NO: 82178 - DNA, 40 bp, Homo sapiens
attacaatgagtaaaaacccagttttcattgttcctaaag

SEQ ID NO: 82179 - DNA, 40 bp, Homo sapiens
ctttaggaacaatgaaaactgggtttttactcattgtaat

SEQ ID NO: 82180 - DNA, 40 bp, Homo sapiens
ttacaatgagtaaaaacccagttttcattgttcctaaagt

SEQ ID NO: 82181 - DNA, 40 bp, Homo sapiens
actttaggaacaatgaaaactgggtttttactcattgtaa

SEQ ID NO: 82182 - DNA, 40 bp, Homo sapiens
tacaatgagtaaaaacccagttttcattgttcctaaagtg

SEQ ID NO: 82183 - DNA, 40 bp, Homo sapiens
cactttaggaacaatgaaaactgggtttttactcattgta

SEQ ID NO: 82184 - DNA, 40 bp, Homo sapiens
acaatgagtaaaaacccagttttcattgttcctaaagtgg

SEQ ID NO: 82185 - DNA, 40 bp, Homo sapiens
ccactttaggaacaatgaaaactgggtttttactcattgt

SEQ ID NO: 82186 - DNA, 40 bp, Homo sapiens
caatgagtaaaaacccagttttcattgttcctaaagtggc

SEQ ID NO: 82187 - DNA, 40 bp, Homo sapiens
gccactttaggaacaatgaaaactgggtttttactcattg

SEQ ID NO: 82188 - DNA, 40 bp, Homo sapiens
aatgagtaaaaacccagttttcattgttcctaaagtggct

SEQ ID NO: 82189 - DNA, 40 bp, Homo sapiens
agccactttaggaacaatgaaaactgggtttttactcatt

SEQ ID NO: 82190 - DNA, 40 bp, Homo sapiens
atgagtaaaaacccagttttcattgttcctaaagtggctt

SEQ ID NO: 82191 - DNA, 40 bp, Homo sapiens
aagccactttaggaacaatgaaaactgggtttttactcat

SEQ ID NO: 82192 - DNA, 40 bp, Homo sapiens
tgagtaaaaacccagttttcattgttcctaaagtggcttg

SEQ ID NO: 82193 - DNA, 40 bp, Homo sapiens
caagccactttaggaacaatgaaaactgggtttttactca

SEQ ID NO: 82194 - DNA, 40 bp, Homo sapiens
gagtaaaaacccagttttcattgttcctaaagtggcttga

SEQ ID NO: 82195 - DNA, 40 bp, Homo sapiens
tcaagccactttaggaacaatgaaaactgggtttttactc

SEQ ID NO: 82196 - DNA, 40 bp, Homo sapiens
agtaaaaacccagttttcattgttcctaaagtggcttgat

SEQ ID NO: 82197 - DNA, 40 bp, Homo sapiens
atcaagccactttaggaacaatgaaaactgggtttttact

SEQ ID NO: 82198 - DNA, 40 bp, Homo sapiens
gtaaaaacccagttttcattgttcctaaagtggcttgatt

SEQ ID NO: 82199 - DNA, 40 bp, Homo sapiens
aatcaagccactttaggaacaatgaaaactgggtttttac

SEQ ID NO: 82200 - DNA, 40 bp, Homo sapiens
taaaaacccagttttcattgttcctaaagtggcttgattt

SEQ ID NO: 82201 - DNA, 40 bp, Homo sapiens
aaatcaagccactttaggaacaatgaaaactgggttttta

SEQ ID NO: 82202 - DNA, 40 bp, Homo sapiens
aaaaacccagttttcattgttcctaaagtggcttgattta

SEQ ID NO: 82203 - DNA, 40 bp, Homo sapiens
taaatcaagccactttaggaacaatgaaaactgggttttt

SEQ ID NO: 82204 - DNA, 40 bp, Homo sapiens
aaaacccagttttcattgttcctaaagtggcttgatttat

SEQ ID NO: 82205 - DNA, 40 bp, Homo sapiens
ataaatcaagccactttaggaacaatgaaaactgggtttt

SEQ ID NO: 82206 - DNA, 40 bp, Homo sapiens
aaacccagttttcattgttcctaaagtggcttgatttata

SEQ ID NO: 82207 - DNA, 40 bp, Homo sapiens
tataaatcaagccactttaggaacaatgaaaactgggttt

SEQ ID NO: 82208 - DNA, 40 bp, Homo sapiens
aacccagttttcattgttcctaaagtggcttgatttatac

SEQ ID NO: 82209 - DNA, 40 bp, Homo sapiens
gtataaatcaagccactttaggaacaatgaaaactgggtt

SEQ ID NO: 82210 - DNA, 40 bp, Homo sapiens
acccagttttcattgttcctaaagtggcttgatttataca

SEQ ID NO: 82211 - DNA, 40 bp, Homo sapiens
tgtataaatcaagccactttaggaacaatgaaaactgggt

SEQ ID NO: 82212 - DNA, 40 bp, Homo sapiens
cccagttttcattgttcctaaagtggcttgatttatacaa

SEQ ID NO: 82213 - DNA, 40 bp, Homo sapiens
ttgtataaatcaagccactttaggaacaatgaaaactggg

SEQ ID NO: 82214 - DNA, 40 bp, Homo sapiens
ccagttttcattgttcctaaagtggcttgatttatacaac

SEQ ID NO: 82215 - DNA, 40 bp, Homo sapiens
gttgtataaatcaagccactttaggaacaatgaaaactgg

SEQ ID NO: 82216 - DNA, 40 bp, Homo sapiens
cagttttcattgttcctaaagtggcttgatttatacaact

SEQ ID NO: 82217 - DNA, 40 bp, Homo sapiens
agttgtataaatcaagccactttaggaacaatgaaaactg

SEQ ID NO: 82218 - DNA, 40 bp, Homo sapiens
agttttcattgttcctaaagtggcttgatttatacaactt

SEQ ID NO: 82219 - DNA, 40 bp, Homo sapiens
aagttgtataaatcaagccactttaggaacaatgaaaact

SEQ ID NO: 82220 - DNA, 40 bp, Homo sapiens
gttttcattgttcctaaagtggcttgatttatacaactta

SEQ ID NO: 82221 - DNA, 40 bp, Homo sapiens
taagttgtataaatcaagccactttaggaacaatgaaaac

SEQ ID NO: 82222 - DNA, 40 bp, Homo sapiens
ttttcattgttcctaaagtggcttgatttatacaacttaa

SEQ ID NO: 82223 - DNA, 40 bp, Homo sapiens
ttaagttgtataaatcaagccactttaggaacaatgaaaa

SEQ ID NO: 82224 - DNA, 40 bp, Homo sapiens
tttcattgttcctaaagtggcttgatttatacaacttaat

SEQ ID NO: 82225 - DNA, 40 bp, Homo sapiens
attaagttgtataaatcaagccactttaggaacaatgaaa

SEQ ID NO: 82226 - DNA, 40 bp, Homo sapiens
ttcattgttcctaaagtggcttgatttatacaacttaatg

SEQ ID NO: 82227 - DNA, 40 bp, Homo sapiens
cattaagttgtataaatcaagccactttaggaacaatgaa

SEQ ID NO: 82228 - DNA, 40 bp, Homo sapiens
tcattgttcctaaagtggcttgatttatacaacttaatgt

SEQ ID NO: 82229 - DNA, 40 bp, Homo sapiens
acattaagttgtataaatcaagccactttaggaacaatga

SEQ ID NO: 82230 - DNA, 40 bp, Homo sapiens
cattgttcctaaagtggcttgatttatacaacttaatgtg

SEQ ID NO: 82231 - DNA, 40 bp, Homo sapiens
cacattaagttgtataaatcaagccactttaggaacaatg

SEQ ID NO: 82232 - DNA, 40 bp, Homo sapiens
attgttcctaaagtggcttgatttatacaacttaatgtgt

SEQ ID NO: 82233 - DNA, 40 bp, Homo sapiens
acacattaagttgtataaatcaagccactttaggaacaat

SEQ ID NO: 82234 - DNA, 40 bp, Homo sapiens
ttgttcctaaagtggcttgatttatacaacttaatgtgtt

SEQ ID NO: 82235 - DNA, 40 bp, Homo sapiens
aacacattaagttgtataaatcaagccactttaggaacaa

SEQ ID NO: 82236 - DNA, 40 bp, Homo sapiens
tgttcctaaagtggcttgatttatacaacttaatgtgttg

SEQ ID NO: 82237 - DNA, 40 bp, Homo sapiens
caacacattaagttgtataaatcaagccactttaggaaca

SEQ ID NO: 82238 - DNA, 40 bp, Homo sapiens
gttcctaaagtggcttgatttatacaacttaatgtgttgg

SEQ ID NO: 82239 - DNA, 40 bp, Homo sapiens
ccaacacattaagttgtataaatcaagccactttaggaac

SEQ ID NO: 82240 - DNA, 40 bp, Homo sapiens
ttcctaaagtggcttgatttatacaacttaatgtgttggg

SEQ ID NO: 82241 - DNA, 40 bp, Homo sapiens
cccaacacattaagttgtataaatcaagccactttaggaa

SEQ ID NO: 82242 - DNA, 40 bp, Homo sapiens
tcctaaagtggcttgatttatacaacttaatgtgttgggt

SEQ ID NO: 82243 - DNA, 40 bp, Homo sapiens
acccaacacattaagttgtataaatcaagccactttagga

SEQ ID NO: 82244 - DNA, 40 bp, Homo sapiens
cctaaagtggcttgatttatacaacttaatgtgttgggta

SEQ ID NO: 82245 - DNA, 40 bp, Homo sapiens
tacccaacacattaagttgtataaatcaagccactttagg

SEQ ID NO: 82246 - DNA, 40 bp, Homo sapiens
ctaaagtggcttgatttatacaacttaatgtgttgggtat

SEQ ID NO: 82247 - DNA, 40 bp, Homo sapiens
atacccaacacattaagttgtataaatcaagccactttag

SEQ ID NO: 82248 - DNA, 40 bp, Homo sapiens
taaagtggcttgatttatacaacttaatgtgttgggtatt

SEQ ID NO: 82249 - DNA, 40 bp, Homo sapiens
aatacccaacacattaagttgtataaatcaagccacttta

SEQ ID NO: 82250 - DNA, 40 bp, Homo sapiens
aaagtggcttgatttatacaacttaatgtgttgggtattt

SEQ ID NO: 82251 - DNA, 40 bp, Homo sapiens
aaatacccaacacattaagttgtataaatcaagccacttt

SEQ ID NO: 82252 - DNA, 40 bp, Homo sapiens
aagtggcttgatttatacaacttaatgtgttgggtatttg

SEQ ID NO: 82253 - DNA, 40 bp, Homo sapiens
caaatacccaacacattaagttgtataaatcaagccactt

SEQ ID NO: 82254 - DNA, 40 bp, Homo sapiens
agtggcttgatttatacaacttaatgtgttgggtatttgt

SEQ ID NO: 82255 - DNA, 40 bp, Homo sapiens
acaaatacccaacacattaagttgtataaatcaagccact

SEQ ID NO: 82256 - DNA, 40 bp, Homo sapiens
gtggcttgatttatacaacttaatgtgttgggtatttgtt

SEQ ID NO: 82257 - DNA, 40 bp, Homo sapiens
aacaaatacccaacacattaagttgtataaatcaagccac

SEQ ID NO: 82258 - DNA, 40 bp, Homo sapiens
tggcttgatttatacaacttaatgtgttgggtatttgttt

SEQ ID NO: 82259 - DNA, 40 bp, Homo sapiens
aaacaaatacccaacacattaagttgtataaatcaagcca

SEQ ID NO: 82260 - DNA, 40 bp, Homo sapiens
ggcttgatttatacaacttaatgtgttgggtatttgtttc

SEQ ID NO: 82261 - DNA, 40 bp, Homo sapiens
gaaacaaatacccaacacattaagttgtataaatcaagcc

SEQ ID NO: 82262 - DNA, 40 bp, Homo sapiens
gcttgatttatacaacttaatgtgttgggtatttgtttct

SEQ ID NO: 82263 - DNA, 40 bp, Homo sapiens
agaaacaaatacccaacacattaagttgtataaatcaagc

SEQ ID NO: 82264 - DNA, 40 bp, Homo sapiens
cttgatttatacaacttaatgtgttgggtatttgtttcta

SEQ ID NO: 82265 - DNA, 40 bp, Homo sapiens
tagaaacaaatacccaacacattaagttgtataaatcaag

SEQ ID NO: 82266 - DNA, 40 bp, Homo sapiens
ttgatttatacaacttaatgtgttgggtatttgtttctaa

SEQ ID NO: 82267 - DNA, 40 bp, Homo sapiens
ttagaaacaaatacccaacacattaagttgtataaatcaa

SEQ ID NO: 82268 - DNA, 40 bp, Homo sapiens
tgatttatacaacttaatgtgttgggtatttgtttctaag

SEQ ID NO: 82269 - DNA, 40 bp, Homo sapiens
cttagaaacaaatacccaacacattaagttgtataaatca

SEQ ID NO: 82270 - DNA, 40 bp, Homo sapiens
gatttatacaacttaatgtgttgggtatttgtttctaaga

SEQ ID NO: 82271 - DNA, 40 bp, Homo sapiens
tcttagaaacaaatacccaacacattaagttgtataaatc

SEQ ID NO: 82272 - DNA, 40 bp, Homo sapiens
atttatacaacttaatgtgttgggtatttgtttctaagac

SEQ ID NO: 82273 - DNA, 40 bp, Homo sapiens
gtcttagaaacaaatacccaacacattaagttgtataaat

SEQ ID NO: 82274 - DNA, 40 bp, Homo sapiens
tttatacaacttaatgtgttgggtatttgtttctaagact

SEQ ID NO: 82275 - DNA, 40 bp, Homo sapiens
agtcttagaaacaaatacccaacacattaagttgtataaa

SEQ ID NO: 82276 - DNA, 40 bp, Homo sapiens
ttatacaacttaatgtgttgggtatttgtttctaagactc

SEQ ID NO: 82277 - DNA, 40 bp, Homo sapiens
gagtcttagaaacaaatacccaacacattaagttgtataa

SEQ ID NO: 82278 - DNA, 40 bp, Homo sapiens
tatacaacttaatgtgttgggtatttgtttctaagactcc

SEQ ID NO: 82279 - DNA, 40 bp, Homo sapiens
ggagtcttagaaacaaatacccaacacattaagttgtata

SEQ ID NO: 82280 - DNA, 40 bp, Homo sapiens
atacaacttaatgtgttgggtatttgtttctaagactccc

SEQ ID NO: 82281 - DNA, 40 bp, Homo sapiens
gggagtcttagaaacaaatacccaacacattaagttgtat

SEQ ID NO: 82282 - DNA, 40 bp, Homo sapiens
tacaacttaatgtgttgggtatttgtttctaagactccct

SEQ ID NO: 82283 - DNA, 40 bp, Homo sapiens
agggagtcttagaaacaaatacccaacacattaagttgta

SEQ ID NO: 82284 - DNA, 40 bp, Homo sapiens
acaacttaatgtgttgggtatttgtttctaagactccctc

SEQ ID NO: 82285 - DNA, 40 bp, Homo sapiens
gagggagtcttagaaacaaatacccaacacattaagttgt

SEQ ID NO: 82286 - DNA, 40 bp, Homo sapiens
caacttaatgtgttgggtatttgtttctaagactccctct

SEQ ID NO: 82287 - DNA, 40 bp, Homo sapiens
agagggagtcttagaaacaaatacccaacacattaagttg

SEQ ID NO: 82288 - DNA, 40 bp, Homo sapiens
aacttaatgtgttgggtatttgtttctaagactccctctg

SEQ ID NO: 82289 - DNA, 40 bp, Homo sapiens
cagagggagtcttagaaacaaatacccaacacattaagtt

SEQ ID NO: 82290 - DNA, 40 bp, Homo sapiens
acttaatgtgttgggtatttgtttctaagactccctctgc

SEQ ID NO: 82291 - DNA, 40 bp, Homo sapiens
gcagagggagtcttagaaacaaatacccaacacattaagt

SEQ ID NO: 82292 - DNA, 40 bp, Homo sapiens
cttaatgtgttgggtatttgtttctaagactccctctgct

SEQ ID NO: 82293 - DNA, 40 bp, Homo sapiens
agcagagggagtcttagaaacaaatacccaacacattaag

SEQ ID NO: 82294 - DNA, 40 bp, Homo sapiens
ttaatgtgttgggtatttgtttctaagactccctctgctg

SEQ ID NO: 82295 - DNA, 40 bp, Homo sapiens
cagcagagggagtcttagaaacaaatacccaacacattaa

SEQ ID NO: 82296 - DNA, 40 bp, Homo sapiens
taatgtgttgggtatttgtttctaagactccctctgctgt

SEQ ID NO: 82297 - DNA, 40 bp, Homo sapiens
acagcagagggagtcttagaaacaaatacccaacacatta

SEQ ID NO: 82298 - DNA, 40 bp, Homo sapiens
aatgtgttgggtatttgtttctaagactccctctgctgtc

SEQ ID NO: 82299 - DNA, 40 bp, Homo sapiens
gacagcagagggagtcttagaaacaaatacccaacacatt

SEQ ID NO: 82300 - DNA, 40 bp, Homo sapiens
atgtgttgggtatttgtttctaagactccctctgctgtct

SEQ ID NO: 82301 - DNA, 40 bp, Homo sapiens
agacagcagagggagtcttagaaacaaatacccaacacat

SEQ ID NO: 82302 - DNA, 40 bp, Homo sapiens
tgtgttgggtatttgtttctaagactccctctgctgtcta

SEQ ID NO: 82303 - DNA, 40 bp, Homo sapiens
tagacagcagagggagtcttagaaacaaatacccaacaca

SEQ ID NO: 82304 - DNA, 40 bp, Homo sapiens
gtgttgggtatttgtttctaagactccctctgctgtctag

SEQ ID NO: 82305 - DNA, 40 bp, Homo sapiens
ctagacagcagagggagtcttagaaacaaatacccaacac

SEQ ID NO: 82306 - DNA, 40 bp, Homo sapiens
tgttgggtatttgtttctaagactccctctgctgtctagg

SEQ ID NO: 82307 - DNA, 40 bp, Homo sapiens
cctagacagcagagggagtcttagaaacaaatacccaaca

SEQ ID NO: 82308 - DNA, 40 bp, Homo sapiens
gttgggtatttgtttctaagactccctctgctgtctaggt

SEQ ID NO: 82309 - DNA, 40 bp, Homo sapiens
acctagacagcagagggagtcttagaaacaaatacccaac

SEQ ID NO: 82310 - DNA, 40 bp, Homo sapiens
ttgggtatttgtttctaagactccctctgctgtctaggtt

SEQ ID NO: 82311 - DNA, 40 bp, Homo sapiens
aacctagacagcagagggagtcttagaaacaaatacccaa

SEQ ID NO: 82312 - DNA, 40 bp, Homo sapiens
tgggtatttgtttctaagactccctctgctgtctaggttt

SEQ ID NO: 82313 - DNA, 40 bp, Homo sapiens
aaacctagacagcagagggagtcttagaaacaaataccca

SEQ ID NO: 82314 - DNA, 40 bp, Homo sapiens
gggtatttgtttctaagactccctctgctgtctaggtttg

SEQ ID NO: 82315 - DNA, 40 bp, Homo sapiens
caaacctagacagcagagggagtcttagaaacaaataccc

SEQ ID NO: 82316 - DNA, 40 bp, Homo sapiens
ggtatttgtttctaagactccctctgctgtctaggtttgg

SEQ ID NO: 82317 - DNA, 40 bp, Homo sapiens
ccaaacctagacagcagagggagtcttagaaacaaatacc

SEQ ID NO: 82318 - DNA, 40 bp, Homo sapiens
gtatttgtttctaagactccctctgctgtctaggtttgga

SEQ ID NO: 82319 - DNA, 40 bp, Homo sapiens
tccaaacctagacagcagagggagtcttagaaacaaatac

SEQ ID NO: 82320 - DNA, 40 bp, Homo sapiens
tatttgtttctaagactccctctgctgtctaggtttggaa

SEQ ID NO: 82321 - DNA, 40 bp, Homo sapiens
ttccaaacctagacagcagagggagtcttagaaacaaata

SEQ ID NO: 82322 - DNA, 40 bp, Homo sapiens
atttgtttctaagactccctctgctgtctaggtttggaag

SEQ ID NO: 82323 - DNA, 40 bp, Homo sapiens
cttccaaacctagacagcagagggagtcttagaaacaaat

SEQ ID NO: 82324 - DNA, 40 bp, Homo sapiens
tttgtttctaagactccctctgctgtctaggtttggaagt

SEQ ID NO: 82325 - DNA, 40 bp, Homo sapiens
acttccaaacctagacagcagagggagtcttagaaacaaa

SEQ ID NO: 82326 - DNA, 40 bp, Homo sapiens
ttgtttctaagactccctctgctgtctaggtttggaagta

SEQ ID NO: 82327 - DNA, 40 bp, Homo sapiens
tacttccaaacctagacagcagagggagtcttagaaacaa

SEQ ID NO: 82328 - DNA, 40 bp, Homo sapiens
tgtttctaagactccctctgctgtctaggtttggaagtat

SEQ ID NO: 82329 - DNA, 40 bp, Homo sapiens
atacttccaaacctagacagcagagggagtcttagaaaca

SEQ ID NO: 82330 - DNA, 40 bp, Homo sapiens
gtttctaagactccctctgctgtctaggtttggaagtatt

SEQ ID NO: 82331 - DNA, 40 bp, Homo sapiens
aatacttccaaacctagacagcagagggagtcttagaaac

SEQ ID NO: 82332 - DNA, 40 bp, Homo sapiens
tttctaagactccctctgctgtctaggtttggaagtattg

SEQ ID NO: 82333 - DNA, 40 bp, Homo sapiens
caatacttccaaacctagacagcagagggagtcttagaaa

SEQ ID NO: 82334 - DNA, 40 bp, Homo sapiens
ttctaagactccctctgctgtctaggtttggaagtattgt

SEQ ID NO: 82335 - DNA, 40 bp, Homo sapiens
acaatacttccaaacctagacagcagagggagtcttagaa

SEQ ID NO: 82336 - DNA, 40 bp, Homo sapiens
tctaagactccctctgctgtctaggtttggaagtattgtg

SEQ ID NO: 82337 - DNA, 40 bp, Homo sapiens
cacaatacttccaaacctagacagcagagggagtcttaga

SEQ ID NO: 82338 - DNA, 40 bp, Homo sapiens
ctaagactccctctgctgtctaggtttggaagtattgtga

SEQ ID NO: 82339 - DNA, 40 bp, Homo sapiens
tcacaatacttccaaacctagacagcagagggagtcttag

SEQ ID NO: 82340 - DNA, 40 bp, Homo sapiens
taagactccctctgctgtctaggtttggaagtattgtgag

SEQ ID NO: 82341 - DNA, 40 bp, Homo sapiens
ctcacaatacttccaaacctagacagcagagggagtctta

SEQ ID NO: 82342 - DNA, 40 bp, Homo sapiens
aagactccctctgctgtctaggtttggaagtattgtgagg

SEQ ID NO: 82343 - DNA, 40 bp, Homo sapiens
cctcacaatacttccaaacctagacagcagagggagtctt

SEQ ID NO: 82344 - DNA, 40 bp, Homo sapiens
agactccctctgctgtctaggtttggaagtattgtgaggt

SEQ ID NO: 82345 - DNA, 40 bp, Homo sapiens
acctcacaatacttccaaacctagacagcagagggagtct

SEQ ID NO: 82346 - DNA, 40 bp, Homo sapiens
gactccctctgctgtctaggtttggaagtattgtgaggtt

SEQ ID NO: 82347 - DNA, 40 bp, Homo sapiens
aacctcacaatacttccaaacctagacagcagagggagtc

SEQ ID NO: 82348 - DNA, 40 bp, Homo sapiens
actccctctgctgtctaggtttggaagtattgtgaggtta

SEQ ID NO: 82349 - DNA, 40 bp, Homo sapiens
taacctcacaatacttccaaacctagacagcagagggagt

SEQ ID NO: 82350 - DNA, 40 bp, Homo sapiens
ctccctctgctgtctaggtttggaagtattgtgaggttaa

SEQ ID NO: 82351 - DNA, 40 bp, Homo sapiens
ttaacctcacaatacttccaaacctagacagcagagggag

SEQ ID NO: 82352 - DNA, 40 bp, Homo sapiens
tccctctgctgtctaggtttggaagtattgtgaggttaac

SEQ ID NO: 82353 - DNA, 40 bp, Homo sapiens
gttaacctcacaatacttccaaacctagacagcagaggga

SEQ ID NO: 82354 - DNA, 40 bp, Homo sapiens
ccctctgctgtctaggtttggaagtattgtgaggttaaca

SEQ ID NO: 82355 - DNA, 40 bp, Homo sapiens
tgttaacctcacaatacttccaaacctagacagcagaggg

SEQ ID NO: 82356 - DNA, 40 bp, Homo sapiens
cctctgctgtctaggtttggaagtattgtgaggttaacag

SEQ ID NO: 82357 - DNA, 40 bp, Homo sapiens
ctgttaacctcacaatacttccaaacctagacagcagagg

SEQ ID NO: 82358 - DNA, 40 bp, Homo sapiens
ctctgctgtctaggtttggaagtattgtgaggttaacaga

SEQ ID NO: 82359 - DNA, 40 bp, Homo sapiens
tctgttaacctcacaatacttccaaacctagacagcagag

SEQ ID NO: 82360 - DNA, 40 bp, Homo sapiens
tctgctgtctaggtttggaagtattgtgaggttaacagat

SEQ ID NO: 82361 - DNA, 40 bp, Homo sapiens
atctgttaacctcacaatacttccaaacctagacagcaga

SEQ ID NO: 82362 - DNA, 40 bp, Homo sapiens
ctgctgtctaggtttggaagtattgtgaggttaacagatt

SEQ ID NO: 82363 - DNA, 40 bp, Homo sapiens
aatctgttaacctcacaatacttccaaacctagacagcag

SEQ ID NO: 82364 - DNA, 40 bp, Homo sapiens
tgctgtctaggtttggaagtattgtgaggttaacagattt

SEQ ID NO: 82365 - DNA, 40 bp, Homo sapiens
aaatctgttaacctcacaatacttccaaacctagacagca

SEQ ID NO: 82366 - DNA, 40 bp, Homo sapiens
gctgtctaggtttggaagtattgtgaggttaacagatttt

SEQ ID NO: 82367 - DNA, 40 bp, Homo sapiens
aaaatctgttaacctcacaatacttccaaacctagacagc

SEQ ID NO: 82368 - DNA, 40 bp, Homo sapiens
ctgtctaggtttggaagtattgtgaggttaacagattttc

SEQ ID NO: 82369 - DNA, 40 bp, Homo sapiens
gaaaatctgttaacctcacaatacttccaaacctagacag

SEQ ID NO: 82370 - DNA, 40 bp, Homo sapiens
tgtctaggtttggaagtattgtgaggttaacagattttct

SEQ ID NO: 82371 - DNA, 40 bp, Homo sapiens
agaaaatctgttaacctcacaatacttccaaacctagaca

SEQ ID NO: 82372 - DNA, 40 bp, Homo sapiens
gtctaggtttggaagtattgtgaggttaacagattttctt

SEQ ID NO: 82373 - DNA, 40 bp, Homo sapiens
aagaaaatctgttaacctcacaatacttccaaacctagac

SEQ ID NO: 82374 - DNA, 40 bp, Homo sapiens
tctaggtttggaagtattgtgaggttaacagattttcttt

SEQ ID NO: 82375 - DNA, 40 bp, Homo sapiens
aaagaaaatctgttaacctcacaatacttccaaacctaga

SEQ ID NO: 82376 - DNA, 40 bp, Homo sapiens
ctaggtttggaagtattgtgaggttaacagattttctttt

SEQ ID NO: 82377 - DNA, 40 bp, Homo sapiens
aaaagaaaatctgttaacctcacaatacttccaaacctag

SEQ ID NO: 82378 - DNA, 40 bp, Homo sapiens
taggtttggaagtattgtgaggttaacagattttcttttt

SEQ ID NO: 82379 - DNA, 40 bp, Homo sapiens
aaaaagaaaatctgttaacctcacaatacttccaaaccta

SEQ ID NO: 82380 - DNA, 40 bp, Homo sapiens
aggtttggaagtattgtgaggttaacagattttcttttta

SEQ ID NO: 82381 - DNA, 40 bp, Homo sapiens
taaaaagaaaatctgttaacctcacaatacttccaaacct

SEQ ID NO: 82382 - DNA, 40 bp, Homo sapiens
ggtttggaagtattgtgaggttaacagattttctttttat

SEQ ID NO: 82383 - DNA, 40 bp, Homo sapiens
ataaaaagaaaatctgttaacctcacaatacttccaaacc

SEQ ID NO: 82384 - DNA, 40 bp, Homo sapiens
gtttggaagtattgtgaggttaacagattttctttttata

SEQ ID NO: 82385 - DNA, 40 bp, Homo sapiens
tataaaaagaaaatctgttaacctcacaatacttccaaac

SEQ ID NO: 82386 - DNA, 40 bp, Homo sapiens
tttggaagtattgtgaggttaacagattttctttttatag

SEQ ID NO: 82387 - DNA, 40 bp, Homo sapiens
ctataaaaagaaaatctgttaacctcacaatacttccaaa

SEQ ID NO: 82388 - DNA, 40 bp, Homo sapiens
ttggaagtattgtgaggttaacagattttctttttatagt

SEQ ID NO: 82389 - DNA, 40 bp, Homo sapiens
actataaaaagaaaatctgttaacctcacaatacttccaa

SEQ ID NO: 82390 - DNA, 40 bp, Homo sapiens
tggaagtattgtgaggttaacagattttctttttatagtt

SEQ ID NO: 82391 - DNA, 40 bp, Homo sapiens
aactataaaaagaaaatctgttaacctcacaatacttcca

SEQ ID NO: 82392 - DNA, 40 bp, Homo sapiens
ggaagtattgtgaggttaacagattttctttttatagtta

SEQ ID NO: 82393 - DNA, 40 bp, Homo sapiens
taactataaaaagaaaatctgttaacctcacaatacttcc

SEQ ID NO: 82394 - DNA, 40 bp, Homo sapiens
gaagtattgtgaggttaacagattttctttttatagttac

SEQ ID NO: 82395 - DNA, 40 bp, Homo sapiens
gtaactataaaaagaaaatctgttaacctcacaatacttc

SEQ ID NO: 82396 - DNA, 40 bp, Homo sapiens
aagtattgtgaggttaacagattttctttttatagttact

SEQ ID NO: 82397 - DNA, 40 bp, Homo sapiens
agtaactataaaaagaaaatctgttaacctcacaatactt

SEQ ID NO: 82398 - DNA, 40 bp, Homo sapiens
agtattgtgaggttaacagattttctttttatagttacta

SEQ ID NO: 82399 - DNA, 40 bp, Homo sapiens
tagtaactataaaaagaaaatctgttaacctcacaatact

SEQ ID NO: 82400 - DNA, 40 bp, Homo sapiens
gtattgtgaggttaacagattttctttttatagttactac

SEQ ID NO: 82401 - DNA, 40 bp, Homo sapiens
gtagtaactataaaaagaaaatctgttaacctcacaatac

SEQ ID NO: 82402 - DNA, 40 bp, Homo sapiens
tattgtgaggttaacagattttctttttatagttactact

SEQ ID NO: 82403 - DNA, 40 bp, Homo sapiens
agtagtaactataaaaagaaaatctgttaacctcacaata

SEQ ID NO: 82404 - DNA, 40 bp, Homo sapiens
attgtgaggttaacagattttctttttatagttactactc

SEQ ID NO: 82405 - DNA, 40 bp, Homo sapiens
gagtagtaactataaaaagaaaatctgttaacctcacaat

SEQ ID NO: 82406 - DNA, 40 bp, Homo sapiens
ttgtgaggttaacagattttctttttatagttactactca

SEQ ID NO: 82407 - DNA, 40 bp, Homo sapiens
tgagtagtaactataaaaagaaaatctgttaacctcacaa

SEQ ID NO: 82408 - DNA, 40 bp, Homo sapiens
tgtgaggttaacagattttctttttatagttactactcag

SEQ ID NO: 82409 - DNA, 40 bp, Homo sapiens
ctgagtagtaactataaaaagaaaatctgttaacctcaca

SEQ ID NO: 82410 - DNA, 40 bp, Homo sapiens
gtgaggttaacagattttctttttatagttactactcagt

SEQ ID NO: 82411 - DNA, 40 bp, Homo sapiens
actgagtagtaactataaaaagaaaatctgttaacctcac

SEQ ID NO: 82412 - DNA, 40 bp, Homo sapiens
tgaggttaacagattttctttttatagttactactcagtt

SEQ ID NO: 82413 - DNA, 40 bp, Homo sapiens
aactgagtagtaactataaaaagaaaatctgttaacctca

SEQ ID NO: 82414 - DNA, 40 bp, Homo sapiens
gaggttaacagattttctttttatagttactactcagttg

SEQ ID NO: 82415 - DNA, 40 bp, Homo sapiens
caactgagtagtaactataaaaagaaaatctgttaacctc

SEQ ID NO: 82416 - DNA, 40 bp, Homo sapiens
aggttaacagattttctttttatagttactactcagttga

SEQ ID NO: 82417 - DNA, 40 bp, Homo sapiens
tcaactgagtagtaactataaaaagaaaatctgttaacct

SEQ ID NO: 82418 - DNA, 40 bp, Homo sapiens
ggttaacagattttctttttatagttactactcagttgaa

SEQ ID NO: 82419 - DNA, 40 bp, Homo sapiens
ttcaactgagtagtaactataaaaagaaaatctgttaacc

SEQ ID NO: 82420 - DNA, 40 bp, Homo sapiens
gttaacagattttctttttatagttactactcagttgaac

SEQ ID NO: 82421 - DNA, 40 bp, Homo sapiens
gttcaactgagtagtaactataaaaagaaaatctgttaac

SEQ ID NO: 82422 - DNA, 40 bp, Homo sapiens
ttaacagattttctttttatagttactactcagttgaaca

SEQ ID NO: 82423 - DNA, 40 bp, Homo sapiens
tgttcaactgagtagtaactataaaaagaaaatctgttaa

SEQ ID NO: 82424 - DNA, 40 bp, Homo sapiens
taacagattttctttttatagttactactcagttgaacag

SEQ ID NO: 82425 - DNA, 40 bp, Homo sapiens
ctgttcaactgagtagtaactataaaaagaaaatctgtta

SEQ ID NO: 82426 - DNA, 40 bp, Homo sapiens
aacagattttctttttatagttactactcagttgaacagg

SEQ ID NO: 82427 - DNA, 40 bp, Homo sapiens
cctgttcaactgagtagtaactataaaaagaaaatctgtt

SEQ ID NO: 82428 - DNA, 40 bp, Homo sapiens
acagattttctttttatagttactactcagttgaacaggc

SEQ ID NO: 82429 - DNA, 40 bp, Homo sapiens
gcctgttcaactgagtagtaactataaaaagaaaatctgt

SEQ ID NO: 82430 - DNA, 40 bp, Homo sapiens
cagattttctttttatagttactactcagttgaacaggct

SEQ ID NO: 82431 - DNA, 40 bp, Homo sapiens
agcctgttcaactgagtagtaactataaaaagaaaatctg

SEQ ID NO: 82432 - DNA, 40 bp, Homo sapiens
agattttctttttatagttactactcagttgaacaggctt

SEQ ID NO: 82433 - DNA, 40 bp, Homo sapiens
aagcctgttcaactgagtagtaactataaaaagaaaatct

SEQ ID NO: 82434 - DNA, 40 bp, Homo sapiens
gattttctttttatagttactactcagttgaacaggcttt

SEQ ID NO: 82435 - DNA, 40 bp, Homo sapiens
aaagcctgttcaactgagtagtaactataaaaagaaaatc

SEQ ID NO: 82436 - DNA, 40 bp, Homo sapiens
attttctttttatagttactactcagttgaacaggcttta

SEQ ID NO: 82437 - DNA, 40 bp, Homo sapiens
taaagcctgttcaactgagtagtaactataaaaagaaaat

SEQ ID NO: 82438 - DNA, 40 bp, Homo sapiens
ttttctttttatagttactactcagttgaacaggctttaa

SEQ ID NO: 82439 - DNA, 40 bp, Homo sapiens
ttaaagcctgttcaactgagtagtaactataaaaagaaaa

SEQ ID NO: 82440 - DNA, 40 bp, Homo sapiens
tttctttttatagttactactcagttgaacaggctttaaa

SEQ ID NO: 82441 - DNA, 40 bp, Homo sapiens
tttaaagcctgttcaactgagtagtaactataaaaagaaa

SEQ ID NO: 82442 - DNA, 40 bp, Homo sapiens
ttctttttatagttactactcagttgaacaggctttaaaa

SEQ ID NO: 82443 - DNA, 40 bp, Homo sapiens
ttttaaagcctgttcaactgagtagtaactataaaaagaa

SEQ ID NO: 82444 - DNA, 40 bp, Homo sapiens
tctttttatagttactactcagttgaacaggctttaaaat

SEQ ID NO: 82445 - DNA, 40 bp, Homo sapiens
attttaaagcctgttcaactgagtagtaactataaaaaga

SEQ ID NO: 82446 - DNA, 40 bp, Homo sapiens
ctttttatagttactactcagttgaacaggctttaaaata

SEQ ID NO: 82447 - DNA, 40 bp, Homo sapiens
tattttaaagcctgttcaactgagtagtaactataaaaag

SEQ ID NO: 82448 - DNA, 40 bp, Homo sapiens
tttttatagttactactcagttgaacaggctttaaaatac

SEQ ID NO: 82449 - DNA, 40 bp, Homo sapiens
gtattttaaagcctgttcaactgagtagtaactataaaaa

SEQ ID NO: 82450 - DNA, 40 bp, Homo sapiens
ttttatagttactactcagttgaacaggctttaaaataca

SEQ ID NO: 82451 - DNA, 40 bp, Homo sapiens
tgtattttaaagcctgttcaactgagtagtaactataaaa

SEQ ID NO: 82452 - DNA, 40 bp, Homo sapiens
tttatagttactactcagttgaacaggctttaaaatacag

SEQ ID NO: 82453 - DNA, 40 bp, Homo sapiens
ctgtattttaaagcctgttcaactgagtagtaactataaa

SEQ ID NO: 82454 - DNA, 40 bp, Homo sapiens
ttatagttactactcagttgaacaggctttaaaatacaga

SEQ ID NO: 82455 - DNA, 40 bp, Homo sapiens
tctgtattttaaagcctgttcaactgagtagtaactataa

SEQ ID NO: 82456 - DNA, 40 bp, Homo sapiens
tatagttactactcagttgaacaggctttaaaatacagag

SEQ ID NO: 82457 - DNA, 40 bp, Homo sapiens
ctctgtattttaaagcctgttcaactgagtagtaactata

SEQ ID NO: 82458 - DNA, 40 bp, Homo sapiens
atagttactactcagttgaacaggctttaaaatacagaga

SEQ ID NO: 82459 - DNA, 40 bp, Homo sapiens
tctctgtattttaaagcctgttcaactgagtagtaactat

SEQ ID NO: 82460 - DNA, 40 bp, Homo sapiens
tagttactactcagttgaacaggctttaaaatacagagag

SEQ ID NO: 82461 - DNA, 40 bp, Homo sapiens
ctctctgtattttaaagcctgttcaactgagtagtaacta

SEQ ID NO: 82462 - DNA, 40 bp, Homo sapiens
agttactactcagttgaacaggctttaaaatacagagaga

SEQ ID NO: 82463 - DNA, 40 bp, Homo sapiens
tctctctgtattttaaagcctgttcaactgagtagtaact

SEQ ID NO: 82464 - DNA, 40 bp, Homo sapiens
gttactactcagttgaacaggctttaaaatacagagagaa

SEQ ID NO: 82465 - DNA, 40 bp, Homo sapiens
ttctctctgtattttaaagcctgttcaactgagtagtaac

SEQ ID NO: 82466 - DNA, 40 bp, Homo sapiens
ttactactcagttgaacaggctttaaaatacagagagaat

SEQ ID NO: 82467 - DNA, 40 bp, Homo sapiens
attctctctgtattttaaagcctgttcaactgagtagtaa

SEQ ID NO: 82468 - DNA, 40 bp, Homo sapiens
tactactcagttgaacaggctttaaaatacagagagaatc

SEQ ID NO: 82469 - DNA, 40 bp, Homo sapiens
gattctctctgtattttaaagcctgttcaactgagtagta

SEQ ID NO: 82470 - DNA, 40 bp, Homo sapiens
actactcagttgaacaggctttaaaatacagagagaatca

SEQ ID NO: 82471 - DNA, 40 bp, Homo sapiens
tgattctctctgtattttaaagcctgttcaactgagtagt

SEQ ID NO: 82472 - DNA, 40 bp, Homo sapiens
ctactcagttgaacaggctttaaaatacagagagaatcat

SEQ ID NO: 82473 - DNA, 40 bp, Homo sapiens
atgattctctctgtattttaaagcctgttcaactgagtag

SEQ ID NO: 82474 - DNA, 40 bp, Homo sapiens
tactcagttgaacaggctttaaaatacagagagaatcata

SEQ ID NO: 82475 - DNA, 40 bp, Homo sapiens
tatgattctctctgtattttaaagcctgttcaactgagta

SEQ ID NO: 82476 - DNA, 40 bp, Homo sapiens
actcagttgaacaggctttaaaatacagagagaatcatat

SEQ ID NO: 82477 - DNA, 40 bp, Homo sapiens
atatgattctctctgtattttaaagcctgttcaactgagt

SEQ ID NO: 82478 - DNA, 40 bp, Homo sapiens
ctcagttgaacaggctttaaaatacagagagaatcatatt

SEQ ID NO: 82479 - DNA, 40 bp, Homo sapiens
aatatgattctctctgtattttaaagcctgttcaactgag

SEQ ID NO: 82480 - DNA, 40 bp, Homo sapiens
tcagttgaacaggctttaaaatacagagagaatcatattt

SEQ ID NO: 82481 - DNA, 40 bp, Homo sapiens
aaatatgattctctctgtattttaaagcctgttcaactga

SEQ ID NO: 82482 - DNA, 40 bp, Homo sapiens
cagttgaacaggctttaaaatacagagagaatcatatttt

SEQ ID NO: 82483 - DNA, 40 bp, Homo sapiens
aaaatatgattctctctgtattttaaagcctgttcaactg

SEQ ID NO: 82484 - DNA, 40 bp, Homo sapiens
agttgaacaggctttaaaatacagagagaatcatattttt

SEQ ID NO: 82485 - DNA, 40 bp, Homo sapiens
aaaaatatgattctctctgtattttaaagcctgttcaact

SEQ ID NO: 82486 - DNA, 40 bp, Homo sapiens
gttgaacaggctttaaaatacagagagaatcatatttttt

SEQ ID NO: 82487 - DNA, 40 bp, Homo sapiens
aaaaaatatgattctctctgtattttaaagcctgttcaac

SEQ ID NO: 82488 - DNA, 40 bp, Homo sapiens
ttgaacaggctttaaaatacagagagaatcatattttttc

SEQ ID NO: 82489 - DNA, 40 bp, Homo sapiens
gaaaaaatatgattctctctgtattttaaagcctgttcaa

SEQ ID NO: 82490 - DNA, 40 bp, Homo sapiens
tgaacaggctttaaaatacagagagaatcatattttttct

SEQ ID NO: 82491 - DNA, 40 bp, Homo sapiens
agaaaaaatatgattctctctgtattttaaagcctgttca

SEQ ID NO: 82492 - DNA, 40 bp, Homo sapiens
gaacaggctttaaaatacagagagaatcatattttttctt

SEQ ID NO: 82493 - DNA, 40 bp, Homo sapiens
aagaaaaaatatgattctctctgtattttaaagcctgttc

SEQ ID NO: 82494 - DNA, 40 bp, Homo sapiens
aacaggctttaaaatacagagagaatcatattttttcttc

SEQ ID NO: 82495 - DNA, 40 bp, Homo sapiens
gaagaaaaaatatgattctctctgtattttaaagcctgtt

SEQ ID NO: 82496 - DNA, 40 bp, Homo sapiens
acaggctttaaaatacagagagaatcatattttttcttca

SEQ ID NO: 82497 - DNA, 40 bp, Homo sapiens
tgaagaaaaaatatgattctctctgtattttaaagcctgt

SEQ ID NO: 82498 - DNA, 40 bp, Homo sapiens
caggctttaaaatacagagagaatcatattttttcttcat

SEQ ID NO: 82499 - DNA, 40 bp, Homo sapiens
atgaagaaaaaatatgattctctctgtattttaaagcctg

SEQ ID NO: 82500 - DNA, 40 bp, Homo sapiens
aggctttaaaatacagagagaatcatattttttcttcatt

SEQ ID NO: 82501 - DNA, 40 bp, Homo sapiens
aatgaagaaaaaatatgattctctctgtattttaaagcct

SEQ ID NO: 82502 - DNA, 40 bp, Homo sapiens
ggctttaaaatacagagagaatcatattttttcttcattt

SEQ ID NO: 82503 - DNA, 40 bp, Homo sapiens
aaatgaagaaaaaatatgattctctctgtattttaaagcc

SEQ ID NO: 82504 - DNA, 40 bp, Homo sapiens
gctttaaaatacagagagaatcatattttttcttcatttt

SEQ ID NO: 82505 - DNA, 40 bp, Homo sapiens
aaaatgaagaaaaaatatgattctctctgtattttaaagc

SEQ ID NO: 82506 - DNA, 40 bp, Homo sapiens
ctttaaaatacagagagaatcatattttttcttcattttt

SEQ ID NO: 82507 - DNA, 40 bp, Homo sapiens
aaaaatgaagaaaaaatatgattctctctgtattttaaag

SEQ ID NO: 82508 - DNA, 40 bp, Homo sapiens
tttaaaatacagagagaatcatattttttcttcatttttt

SEQ ID NO: 82509 - DNA, 40 bp, Homo sapiens
aaaaaatgaagaaaaaatatgattctctctgtattttaaa

SEQ ID NO: 82510 - DNA, 40 bp, Homo sapiens
ttaaaatacagagagaatcatattttttcttcattttttg

SEQ ID NO: 82511 - DNA, 40 bp, Homo sapiens
caaaaaatgaagaaaaaatatgattctctctgtattttaa

SEQ ID NO: 82512 - DNA, 40 bp, Homo sapiens
taaaatacagagagaatcatattttttcttcattttttgc

SEQ ID NO: 82513 - DNA, 40 bp, Homo sapiens
gcaaaaaatgaagaaaaaatatgattctctctgtatttta

SEQ ID NO: 82514 - DNA, 40 bp, Homo sapiens
aaaatacagagagaatcatattttttcttcattttttgct

SEQ ID NO: 82515 - DNA, 40 bp, Homo sapiens
agcaaaaaatgaagaaaaaatatgattctctctgtatttt

SEQ ID NO: 82516 - DNA, 40 bp, Homo sapiens
aaatacagagagaatcatattttttcttcattttttgctt

SEQ ID NO: 82517 - DNA, 40 bp, Homo sapiens
aagcaaaaaatgaagaaaaaatatgattctctctgtattt

SEQ ID NO: 82518 - DNA, 40 bp, Homo sapiens
aatacagagagaatcatattttttcttcattttttgcttt

SEQ ID NO: 82519 - DNA, 40 bp, Homo sapiens
aaagcaaaaaatgaagaaaaaatatgattctctctgtatt

SEQ ID NO: 82520 - DNA, 40 bp, Homo sapiens
atacagagagaatcatattttttcttcattttttgctttt

SEQ ID NO: 82521 - DNA, 40 bp, Homo sapiens
aaaagcaaaaaatgaagaaaaaatatgattctctctgtat

SEQ ID NO: 82522 - DNA, 40 bp, Homo sapiens
tacagagagaatcatattttttcttcattttttgctttta

SEQ ID NO: 82523 - DNA, 40 bp, Homo sapiens
taaaagcaaaaaatgaagaaaaaatatgattctctctgta

SEQ ID NO: 82524 - DNA, 40 bp, Homo sapiens
acagagagaatcatattttttcttcattttttgcttttat

SEQ ID NO: 82525 - DNA, 40 bp, Homo sapiens
ataaaagcaaaaaatgaagaaaaaatatgattctctctgt

SEQ ID NO: 82526 - DNA, 40 bp, Homo sapiens
cagagagaatcatattttttcttcattttttgcttttatt

SEQ ID NO: 82527 - DNA, 40 bp, Homo sapiens
aataaaagcaaaaaatgaagaaaaaatatgattctctctg

SEQ ID NO: 82528 - DNA, 40 bp, Homo sapiens
agagagaatcatattttttcttcattttttgcttttattt

SEQ ID NO: 82529 - DNA, 40 bp, Homo sapiens
aaataaaagcaaaaaatgaagaaaaaatatgattctctct

SEQ ID NO: 82530 - DNA, 40 bp, Homo sapiens
gagagaatcatattttttcttcattttttgcttttattta

SEQ ID NO: 82531 - DNA, 40 bp, Homo sapiens
taaataaaagcaaaaaatgaagaaaaaatatgattctctc

SEQ ID NO: 82532 - DNA, 40 bp, Homo sapiens
agagaatcatattttttcttcattttttgcttttatttat

SEQ ID NO: 82533 - DNA, 40 bp, Homo sapiens
ataaataaaagcaaaaaatgaagaaaaaatatgattctct

SEQ ID NO: 82534 - DNA, 40 bp, Homo sapiens
gagaatcatattttttcttcattttttgcttttatttata

SEQ ID NO: 82535 - DNA, 40 bp, Homo sapiens
tataaataaaagcaaaaaatgaagaaaaaatatgattctc

SEQ ID NO: 82536 - DNA, 40 bp, Homo sapiens
agaatcatattttttcttcattttttgcttttatttatat

SEQ ID NO: 82537 - DNA, 40 bp, Homo sapiens
atataaataaaagcaaaaaatgaagaaaaaatatgattct

SEQ ID NO: 82538 - DNA, 40 bp, Homo sapiens
gaatcatattttttcttcattttttgcttttatttatatt

SEQ ID NO: 82539 - DNA, 40 bp, Homo sapiens
aatataaataaaagcaaaaaatgaagaaaaaatatgattc

SEQ ID NO: 82540 - DNA, 40 bp, Homo sapiens
aatcatattttttcttcattttttgcttttatttatattt

SEQ ID NO: 82541 - DNA, 40 bp, Homo sapiens
aaatataaataaaagcaaaaaatgaagaaaaaatatgatt

SEQ ID NO: 82542 - DNA, 40 bp, Homo sapiens
atcatattttttcttcattttttgcttttatttatatttt

SEQ ID NO: 82543 - DNA, 40 bp, Homo sapiens
aaaatataaataaaagcaaaaaatgaagaaaaaatatgat

SEQ ID NO: 82544 - DNA, 40 bp, Homo sapiens
tcatattttttcttcattttttgcttttatttatattttt

SEQ ID NO: 82545 - DNA, 40 bp, Homo sapiens
aaaaatataaataaaagcaaaaaatgaagaaaaaatatga

SEQ ID NO: 82546 - DNA, 40 bp, Homo sapiens
catattttttcttcattttttgcttttatttatatttttc

SEQ ID NO: 82547 - DNA, 40 bp, Homo sapiens
gaaaaatataaataaaagcaaaaaatgaagaaaaaatatg

SEQ ID NO: 82548 - DNA, 40 bp, Homo sapiens
atattttttcttcattttttgcttttatttatatttttct

SEQ ID NO: 82549 - DNA, 40 bp, Homo sapiens
agaaaaatataaataaaagcaaaaaatgaagaaaaaatat

SEQ ID NO: 82550 - DNA, 40 bp, Homo sapiens
tattttttcttcattttttgcttttatttatatttttctt

SEQ ID NO: 82551 - DNA, 40 bp, Homo sapiens
aagaaaaatataaataaaagcaaaaaatgaagaaaaaata

SEQ ID NO: 82552 - DNA, 40 bp, Homo sapiens
attttttcttcattttttgcttttatttatatttttcttt

SEQ ID NO: 82553 - DNA, 40 bp, Homo sapiens
aaagaaaaatataaataaaagcaaaaaatgaagaaaaaat

SEQ ID NO: 82554 - DNA, 40 bp, Homo sapiens
ttttttcttcattttttgcttttatttatatttttctttt

SEQ ID NO: 82555 - DNA, 40 bp, Homo sapiens
aaaagaaaaatataaataaaagcaaaaaatgaagaaaaaa

SEQ ID NO: 82556 - DNA, 40 bp, Homo sapiens
tttttcttcattttttgcttttatttatatttttctttta

SEQ ID NO: 82557 - DNA, 40 bp, Homo sapiens
taaaagaaaaatataaataaaagcaaaaaatgaagaaaaa

SEQ ID NO: 82558 - DNA, 40 bp, Homo sapiens
ttttcttcattttttgcttttatttatatttttcttttaa

SEQ ID NO: 82559 - DNA, 40 bp, Homo sapiens
ttaaaagaaaaatataaataaaagcaaaaaatgaagaaaa

SEQ ID NO: 82560 - DNA, 40 bp, Homo sapiens
tttcttcattttttgcttttatttatatttttcttttaat

SEQ ID NO: 82561 - DNA, 40 bp, Homo sapiens
attaaaagaaaaatataaataaaagcaaaaaatgaagaaa

SEQ ID NO: 82562 - DNA, 40 bp, Homo sapiens
ttcttcattttttgcttttatttatatttttcttttaatt

SEQ ID NO: 82563 - DNA, 40 bp, Homo sapiens
aattaaaagaaaaatataaataaaagcaaaaaatgaagaa

SEQ ID NO: 82564 - DNA, 40 bp, Homo sapiens
tcttcattttttgcttttatttatatttttcttttaattg

SEQ ID NO: 82565 - DNA, 40 bp, Homo sapiens
caattaaaagaaaaatataaataaaagcaaaaaatgaaga

SEQ ID NO: 82566 - DNA, 40 bp, Homo sapiens
cttcattttttgcttttatttatatttttcttttaattgg

SEQ ID NO: 82567 - DNA, 40 bp, Homo sapiens
ccaattaaaagaaaaatataaataaaagcaaaaaatgaag

SEQ ID NO: 82568 - DNA, 40 bp, Homo sapiens
ttcattttttgcttttatttatatttttcttttaattgga

SEQ ID NO: 82569 - DNA, 40 bp, Homo sapiens
tccaattaaaagaaaaatataaataaaagcaaaaaatgaa

SEQ ID NO: 82570 - DNA, 40 bp, Homo sapiens
tcattttttgcttttatttatatttttcttttaattggag

SEQ ID NO: 82571 - DNA, 40 bp, Homo sapiens
ctccaattaaaagaaaaatataaataaaagcaaaaaatga

SEQ ID NO: 82572 - DNA, 40 bp, Homo sapiens
cattttttgcttttatttatatttttcttttaattggaga

SEQ ID NO: 82573 - DNA, 40 bp, Homo sapiens
tctccaattaaaagaaaaatataaataaaagcaaaaaatg

SEQ ID NO: 82574 - DNA, 40 bp, Homo sapiens
attttttgcttttatttatatttttcttttaattggagac

SEQ ID NO: 82575 - DNA, 40 bp, Homo sapiens
gtctccaattaaaagaaaaatataaataaaagcaaaaaat

SEQ ID NO: 82576 - DNA, 40 bp, Homo sapiens
ttttttgcttttatttatatttttcttttaattggagaca

SEQ ID NO: 82577 - DNA, 40 bp, Homo sapiens
tgtctccaattaaaagaaaaatataaataaaagcaaaaaa

SEQ ID NO: 82578 - DNA, 40 bp, Homo sapiens
tttttgcttttatttatatttttcttttaattggagacat

SEQ ID NO: 82579 - DNA, 40 bp, Homo sapiens
atgtctccaattaaaagaaaaatataaataaaagcaaaaa

SEQ ID NO: 82580 - DNA, 40 bp, Homo sapiens
ttttgcttttatttatatttttcttttaattggagacatg

SEQ ID NO: 82581 - DNA, 40 bp, Homo sapiens
catgtctccaattaaaagaaaaatataaataaaagcaaaa

SEQ ID NO: 82582 - DNA, 40 bp, Homo sapiens
tttgcttttatttatatttttcttttaattggagacatga

SEQ ID NO: 82583 - DNA, 40 bp, Homo sapiens
tcatgtctccaattaaaagaaaaatataaataaaagcaaa

SEQ ID NO: 82584 - DNA, 40 bp, Homo sapiens
ttgcttttatttatatttttcttttaattggagacatgac

SEQ ID NO: 82585 - DNA, 40 bp, Homo sapiens
gtcatgtctccaattaaaagaaaaatataaataaaagcaa

SEQ ID NO: 82586 - DNA, 40 bp, Homo sapiens
tgcttttatttatatttttcttttaattggagacatgaca

SEQ ID NO: 82587 - DNA, 40 bp, Homo sapiens
tgtcatgtctccaattaaaagaaaaatataaataaaagca

SEQ ID NO: 82588 - DNA, 40 bp, Homo sapiens
gcttttatttatatttttcttttaattggagacatgacaa

SEQ ID NO: 82589 - DNA, 40 bp, Homo sapiens
ttgtcatgtctccaattaaaagaaaaatataaataaaagc

SEQ ID NO: 82590 - DNA, 40 bp, Homo sapiens
cttttatttatatttttcttttaattggagacatgacaag

SEQ ID NO: 82591 - DNA, 40 bp, Homo sapiens
cttgtcatgtctccaattaaaagaaaaatataaataaaag

SEQ ID NO: 82592 - DNA, 40 bp, Homo sapiens
ttttatttatatttttcttttaattggagacatgacaaga

SEQ ID NO: 82593 - DNA, 40 bp, Homo sapiens
tcttgtcatgtctccaattaaaagaaaaatataaataaaa

SEQ ID NO: 82594 - DNA, 40 bp, Homo sapiens
tttatttatatttttcttttaattggagacatgacaagaa

SEQ ID NO: 82595 - DNA, 40 bp, Homo sapiens
ttcttgtcatgtctccaattaaaagaaaaatataaataaa

SEQ ID NO: 82596 - DNA, 40 bp, Homo sapiens
ttatttatatttttcttttaattggagacatgacaagaat

SEQ ID NO: 82597 - DNA, 40 bp, Homo sapiens
attcttgtcatgtctccaattaaaagaaaaatataaataa

SEQ ID NO: 82598 - DNA, 40 bp, Homo sapiens
tatttatatttttcttttaattggagacatgacaagaatt

SEQ ID NO: 82599 - DNA, 40 bp, Homo sapiens
aattcttgtcatgtctccaattaaaagaaaaatataaata

SEQ ID NO: 82600 - DNA, 40 bp, Homo sapiens
atttatatttttcttttaattggagacatgacaagaattg

SEQ ID NO: 82601 - DNA, 40 bp, Homo sapiens
caattcttgtcatgtctccaattaaaagaaaaatataaat

SEQ ID NO: 82602 - DNA, 40 bp, Homo sapiens
tttatatttttcttttaattggagacatgacaagaattga

SEQ ID NO: 82603 - DNA, 40 bp, Homo sapiens
tcaattcttgtcatgtctccaattaaaagaaaaatataaa

SEQ ID NO: 82604 - DNA, 40 bp, Homo sapiens
ttatatttttcttttaattggagacatgacaagaattgac

SEQ ID NO: 82605 - DNA, 40 bp, Homo sapiens
gtcaattcttgtcatgtctccaattaaaagaaaaatataa

SEQ ID NO: 82606 - DNA, 40 bp, Homo sapiens
tatatttttcttttaattggagacatgacaagaattgact

SEQ ID NO: 82607 - DNA, 40 bp, Homo sapiens
agtcaattcttgtcatgtctccaattaaaagaaaaatata

SEQ ID NO: 82608 - DNA, 40 bp, Homo sapiens
atatttttcttttaattggagacatgacaagaattgactt

SEQ ID NO: 82609 - DNA, 40 bp, Homo sapiens
aagtcaattcttgtcatgtctccaattaaaagaaaaatat

SEQ ID NO: 82610 - DNA, 40 bp, Homo sapiens
tatttttcttttaattggagacatgacaagaattgacttg

SEQ ID NO: 82611 - DNA, 40 bp, Homo sapiens
caagtcaattcttgtcatgtctccaattaaaagaaaaata

SEQ ID NO: 82612 - DNA, 40 bp, Homo sapiens
atttttcttttaattggagacatgacaagaattgacttgt

SEQ ID NO: 82613 - DNA, 40 bp, Homo sapiens
acaagtcaattcttgtcatgtctccaattaaaagaaaaat

SEQ ID NO: 82614 - DNA, 40 bp, Homo sapiens
tttttcttttaattggagacatgacaagaattgacttgtg

SEQ ID NO: 82615 - DNA, 40 bp, Homo sapiens
cacaagtcaattcttgtcatgtctccaattaaaagaaaaa

SEQ ID NO: 82616 - DNA, 40 bp, Homo sapiens
ttttcttttaattggagacatgacaagaattgacttgtgt

SEQ ID NO: 82617 - DNA, 40 bp, Homo sapiens
acacaagtcaattcttgtcatgtctccaattaaaagaaaa

SEQ ID NO: 82618 - DNA, 40 bp, Homo sapiens
tttcttttaattggagacatgacaagaattgacttgtgta

SEQ ID NO: 82619 - DNA, 40 bp, Homo sapiens
tacacaagtcaattcttgtcatgtctccaattaaaagaaa

SEQ ID NO: 82620 - DNA, 40 bp, Homo sapiens
ttcttttaattggagacatgacaagaattgacttgtgtat

SEQ ID NO: 82621 - DNA, 40 bp, Homo sapiens
atacacaagtcaattcttgtcatgtctccaattaaaagaa

SEQ ID NO: 82622 - DNA, 40 bp, Homo sapiens
tcttttaattggagacatgacaagaattgacttgtgtatg

SEQ ID NO: 82623 - DNA, 40 bp, Homo sapiens
catacacaagtcaattcttgtcatgtctccaattaaaaga

SEQ ID NO: 82624 - DNA, 40 bp, Homo sapiens
cttttaattggagacatgacaagaattgacttgtgtatgg

SEQ ID NO: 82625 - DNA, 40 bp, Homo sapiens
ccatacacaagtcaattcttgtcatgtctccaattaaaag

SEQ ID NO: 82626 - DNA, 40 bp, Homo sapiens
ttttaattggagacatgacaagaattgacttgtgtatgga

SEQ ID NO: 82627 - DNA, 40 bp, Homo sapiens
tccatacacaagtcaattcttgtcatgtctccaattaaaa

SEQ ID NO: 82628 - DNA, 40 bp, Homo sapiens
tttaattggagacatgacaagaattgacttgtgtatggat

SEQ ID NO: 82629 - DNA, 40 bp, Homo sapiens
atccatacacaagtcaattcttgtcatgtctccaattaaa

SEQ ID NO: 82630 - DNA, 40 bp, Homo sapiens
ttaattggagacatgacaagaattgacttgtgtatggatc

SEQ ID NO: 82631 - DNA, 40 bp, Homo sapiens
gatccatacacaagtcaattcttgtcatgtctccaattaa

SEQ ID NO: 82632 - DNA, 40 bp, Homo sapiens
taattggagacatgacaagaattgacttgtgtatggatct

SEQ ID NO: 82633 - DNA, 40 bp, Homo sapiens
agatccatacacaagtcaattcttgtcatgtctccaatta

SEQ ID NO: 82634 - DNA, 40 bp, Homo sapiens
aattggagacatgacaagaattgacttgtgtatggatctt

SEQ ID NO: 82635 - DNA, 40 bp, Homo sapiens
aagatccatacacaagtcaattcttgtcatgtctccaatt

SEQ ID NO: 82636 - DNA, 40 bp, Homo sapiens
attggagacatgacaagaattgacttgtgtatggatcttg

SEQ ID NO: 82637 - DNA, 40 bp, Homo sapiens
caagatccatacacaagtcaattcttgtcatgtctccaat

SEQ ID NO: 82638 - DNA, 40 bp, Homo sapiens
ttggagacatgacaagaattgacttgtgtatggatcttgc

SEQ ID NO: 82639 - DNA, 40 bp, Homo sapiens
gcaagatccatacacaagtcaattcttgtcatgtctccaa

SEQ ID NO: 82640 - DNA, 40 bp, Homo sapiens
tggagacatgacaagaattgacttgtgtatggatcttgca

SEQ ID NO: 82641 - DNA, 40 bp, Homo sapiens
tgcaagatccatacacaagtcaattcttgtcatgtctcca

SEQ ID NO: 82642 - DNA, 40 bp, Homo sapiens
ggagacatgacaagaattgacttgtgtatggatcttgcat

SEQ ID NO: 82643 - DNA, 40 bp, Homo sapiens
atgcaagatccatacacaagtcaattcttgtcatgtctcc

SEQ ID NO: 82644 - DNA, 40 bp, Homo sapiens
gagacatgacaagaattgacttgtgtatggatcttgcata

SEQ ID NO: 82645 - DNA, 40 bp, Homo sapiens
tatgcaagatccatacacaagtcaattcttgtcatgtctc

SEQ ID NO: 82646 - DNA, 40 bp, Homo sapiens
agacatgacaagaattgacttgtgtatggatcttgcataa

SEQ ID NO: 82647 - DNA, 40 bp, Homo sapiens
ttatgcaagatccatacacaagtcaattcttgtcatgtct

SEQ ID NO: 82648 - DNA, 40 bp, Homo sapiens
gacatgacaagaattgacttgtgtatggatcttgcataat

SEQ ID NO: 82649 - DNA, 40 bp, Homo sapiens
attatgcaagatccatacacaagtcaattcttgtcatgtc

SEQ ID NO: 82650 - DNA, 40 bp, Homo sapiens
acatgacaagaattgacttgtgtatggatcttgcataatt

SEQ ID NO: 82651 - DNA, 40 bp, Homo sapiens
aattatgcaagatccatacacaagtcaattcttgtcatgt

SEQ ID NO: 82652 - DNA, 40 bp, Homo sapiens
catgacaagaattgacttgtgtatggatcttgcataattt

SEQ ID NO: 82653 - DNA, 40 bp, Homo sapiens
aaattatgcaagatccatacacaagtcaattcttgtcatg

SEQ ID NO: 82654 - DNA, 40 bp, Homo sapiens
atgacaagaattgacttgtgtatggatcttgcataattta

SEQ ID NO: 82655 - DNA, 40 bp, Homo sapiens
taaattatgcaagatccatacacaagtcaattcttgtcat

SEQ ID NO: 82656 - DNA, 40 bp, Homo sapiens
tgacaagaattgacttgtgtatggatcttgcataatttaa

SEQ ID NO: 82657 - DNA, 40 bp, Homo sapiens
ttaaattatgcaagatccatacacaagtcaattcttgtca

SEQ ID NO: 82658 - DNA, 40 bp, Homo sapiens
gacaagaattgacttgtgtatggatcttgcataatttaag

SEQ ID NO: 82659 - DNA, 40 bp, Homo sapiens
cttaaattatgcaagatccatacacaagtcaattcttgtc

SEQ ID NO: 82660 - DNA, 40 bp, Homo sapiens
acaagaattgacttgtgtatggatcttgcataatttaagt

SEQ ID NO: 82661 - DNA, 40 bp, Homo sapiens
acttaaattatgcaagatccatacacaagtcaattcttgt

SEQ ID NO: 82662 - DNA, 40 bp, Homo sapiens
caagaattgacttgtgtatggatcttgcataatttaagta

SEQ ID NO: 82663 - DNA, 40 bp, Homo sapiens
tacttaaattatgcaagatccatacacaagtcaattcttg

SEQ ID NO: 82664 - DNA, 40 bp, Homo sapiens
aagaattgacttgtgtatggatcttgcataatttaagtac

SEQ ID NO: 82665 - DNA, 40 bp, Homo sapiens
gtacttaaattatgcaagatccatacacaagtcaattctt

SEQ ID NO: 82666 - DNA, 40 bp, Homo sapiens
agaattgacttgtgtatggatcttgcataatttaagtact

SEQ ID NO: 82667 - DNA, 40 bp, Homo sapiens
agtacttaaattatgcaagatccatacacaagtcaattct

SEQ ID NO: 82668 - DNA, 40 bp, Homo sapiens
gaattgacttgtgtatggatcttgcataatttaagtactg

SEQ ID NO: 82669 - DNA, 40 bp, Homo sapiens
cagtacttaaattatgcaagatccatacacaagtcaattc

SEQ ID NO: 82670 - DNA, 40 bp, Homo sapiens
aattgacttgtgtatggatcttgcataatttaagtactgc

SEQ ID NO: 82671 - DNA, 40 bp, Homo sapiens
gcagtacttaaattatgcaagatccatacacaagtcaatt

SEQ ID NO: 82672 - DNA, 40 bp, Homo sapiens
attgacttgtgtatggatcttgcataatttaagtactgca

SEQ ID NO: 82673 - DNA, 40 bp, Homo sapiens
tgcagtacttaaattatgcaagatccatacacaagtcaat

SEQ ID NO: 82674 - DNA, 40 bp, Homo sapiens
ttgacttgtgtatggatcttgcataatttaagtactgcag

SEQ ID NO: 82675 - DNA, 40 bp, Homo sapiens
ctgcagtacttaaattatgcaagatccatacacaagtcaa

SEQ ID NO: 82676 - DNA, 40 bp, Homo sapiens
tgacttgtgtatggatcttgcataatttaagtactgcagg

SEQ ID NO: 82677 - DNA, 40 bp, Homo sapiens
cctgcagtacttaaattatgcaagatccatacacaagtca

SEQ ID NO: 82678 - DNA, 40 bp, Homo sapiens
gacttgtgtatggatcttgcataatttaagtactgcaggt

SEQ ID NO: 82679 - DNA, 40 bp, Homo sapiens
acctgcagtacttaaattatgcaagatccatacacaagtc

SEQ ID NO: 82680 - DNA, 40 bp, Homo sapiens
acttgtgtatggatcttgcataatttaagtactgcaggtt

SEQ ID NO: 82681 - DNA, 40 bp, Homo sapiens
aacctgcagtacttaaattatgcaagatccatacacaagt

SEQ ID NO: 82682 - DNA, 40 bp, Homo sapiens
cttgtgtatggatcttgcataatttaagtactgcaggttt

SEQ ID NO: 82683 - DNA, 40 bp, Homo sapiens
aaacctgcagtacttaaattatgcaagatccatacacaag

SEQ ID NO: 82684 - DNA, 40 bp, Homo sapiens
ttgtgtatggatcttgcataatttaagtactgcaggttta

SEQ ID NO: 82685 - DNA, 40 bp, Homo sapiens
taaacctgcagtacttaaattatgcaagatccatacacaa

SEQ ID NO: 82686 - DNA, 40 bp, Homo sapiens
tgtgtatggatcttgcataatttaagtactgcaggtttaa

SEQ ID NO: 82687 - DNA, 40 bp, Homo sapiens
ttaaacctgcagtacttaaattatgcaagatccatacaca

SEQ ID NO: 82688 - DNA, 40 bp, Homo sapiens
gtgtatggatcttgcataatttaagtactgcaggtttaaa

SEQ ID NO: 82689 - DNA, 40 bp, Homo sapiens
tttaaacctgcagtacttaaattatgcaagatccatacac

SEQ ID NO: 82690 - DNA, 40 bp, Homo sapiens
tgtatggatcttgcataatttaagtactgcaggtttaaaa

SEQ ID NO: 82691 - DNA, 40 bp, Homo sapiens
ttttaaacctgcagtacttaaattatgcaagatccataca

SEQ ID NO: 82692 - DNA, 40 bp, Homo sapiens
gtatggatcttgcataatttaagtactgcaggtttaaaat

SEQ ID NO: 82693 - DNA, 40 bp, Homo sapiens
attttaaacctgcagtacttaaattatgcaagatccatac

SEQ ID NO: 82694 - DNA, 40 bp, Homo sapiens
tatggatcttgcataatttaagtactgcaggtttaaaatc

SEQ ID NO: 82695 - DNA, 40 bp, Homo sapiens
gattttaaacctgcagtacttaaattatgcaagatccata

SEQ ID NO: 82696 - DNA, 40 bp, Homo sapiens
atggatcttgcataatttaagtactgcaggtttaaaatct

SEQ ID NO: 82697 - DNA, 40 bp, Homo sapiens
agattttaaacctgcagtacttaaattatgcaagatccat

SEQ ID NO: 82698 - DNA, 40 bp, Homo sapiens
tggatcttgcataatttaagtactgcaggtttaaaatcta

SEQ ID NO: 82699 - DNA, 40 bp, Homo sapiens
tagattttaaacctgcagtacttaaattatgcaagatcca

SEQ ID NO: 82700 - DNA, 40 bp, Homo sapiens
ggatcttgcataatttaagtactgcaggtttaaaatctac

SEQ ID NO: 82701 - DNA, 40 bp, Homo sapiens
gtagattttaaacctgcagtacttaaattatgcaagatcc

SEQ ID NO: 82702 - DNA, 40 bp, Homo sapiens
gatcttgcataatttaagtactgcaggtttaaaatctact

SEQ ID NO: 82703 - DNA, 40 bp, Homo sapiens
agtagattttaaacctgcagtacttaaattatgcaagatc

SEQ ID NO: 82704 - DNA, 40 bp, Homo sapiens
atcttgcataatttaagtactgcaggtttaaaatctacta

SEQ ID NO: 82705 - DNA, 40 bp, Homo sapiens
tagtagattttaaacctgcagtacttaaattatgcaagat

SEQ ID NO: 82706 - DNA, 40 bp, Homo sapiens
tcttgcataatttaagtactgcaggtttaaaatctactac

SEQ ID NO: 82707 - DNA, 40 bp, Homo sapiens
gtagtagattttaaacctgcagtacttaaattatgcaaga

SEQ ID NO: 82708 - DNA, 40 bp, Homo sapiens
cttgcataatttaagtactgcaggtttaaaatctactacc

SEQ ID NO: 82709 - DNA, 40 bp, Homo sapiens
ggtagtagattttaaacctgcagtacttaaattatgcaag

SEQ ID NO: 82710 - DNA, 40 bp, Homo sapiens
ttgcataatttaagtactgcaggtttaaaatctactacca

SEQ ID NO: 82711 - DNA, 40 bp, Homo sapiens
tggtagtagattttaaacctgcagtacttaaattatgcaa

SEQ ID NO: 82712 - DNA, 40 bp, Homo sapiens
tgcataatttaagtactgcaggtttaaaatctactaccag

SEQ ID NO: 82713 - DNA, 40 bp, Homo sapiens
ctggtagtagattttaaacctgcagtacttaaattatgca

SEQ ID NO: 82714 - DNA, 40 bp, Homo sapiens
gcataatttaagtactgcaggtttaaaatctactaccagt

SEQ ID NO: 82715 - DNA, 40 bp, Homo sapiens
actggtagtagattttaaacctgcagtacttaaattatgc

SEQ ID NO: 82716 - DNA, 40 bp, Homo sapiens
cataatttaagtactgcaggtttaaaatctactaccagtt

SEQ ID NO: 82717 - DNA, 40 bp, Homo sapiens
aactggtagtagattttaaacctgcagtacttaaattatg

SEQ ID NO: 82718 - DNA, 40 bp, Homo sapiens
ataatttaagtactgcaggtttaaaatctactaccagttt

SEQ ID NO: 82719 - DNA, 40 bp, Homo sapiens
aaactggtagtagattttaaacctgcagtacttaaattat

SEQ ID NO: 82720 - DNA, 40 bp, Homo sapiens
taatttaagtactgcaggtttaaaatctactaccagtttg

SEQ ID NO: 82721 - DNA, 40 bp, Homo sapiens
caaactggtagtagattttaaacctgcagtacttaaatta

SEQ ID NO: 82722 - DNA, 40 bp, Homo sapiens
aatttaagtactgcaggtttaaaatctactaccagtttga

SEQ ID NO: 82723 - DNA, 40 bp, Homo sapiens
tcaaactggtagtagattttaaacctgcagtacttaaatt

SEQ ID NO: 82724 - DNA, 40 bp, Homo sapiens
atttaagtactgcaggtttaaaatctactaccagtttgag

SEQ ID NO: 82725 - DNA, 40 bp, Homo sapiens
ctcaaactggtagtagattttaaacctgcagtacttaaat

SEQ ID NO: 82726 - DNA, 40 bp, Homo sapiens
tttaagtactgcaggtttaaaatctactaccagtttgaga

SEQ ID NO: 82727 - DNA, 40 bp, Homo sapiens
tctcaaactggtagtagattttaaacctgcagtacttaaa

SEQ ID NO: 82728 - DNA, 40 bp, Homo sapiens
ttaagtactgcaggtttaaaatctactaccagtttgagag

SEQ ID NO: 82729 - DNA, 40 bp, Homo sapiens
ctctcaaactggtagtagattttaaacctgcagtacttaa

SEQ ID NO: 82730 - DNA, 40 bp, Homo sapiens
taagtactgcaggtttaaaatctactaccagtttgagagt

SEQ ID NO: 82731 - DNA, 40 bp, Homo sapiens
actctcaaactggtagtagattttaaacctgcagtactta

SEQ ID NO: 82732 - DNA, 40 bp, Homo sapiens
aagtactgcaggtttaaaatctactaccagtttgagagtg

SEQ ID NO: 82733 - DNA, 40 bp, Homo sapiens
cactctcaaactggtagtagattttaaacctgcagtactt

SEQ ID NO: 82734 - DNA, 40 bp, Homo sapiens
agtactgcaggtttaaaatctactaccagtttgagagtgc

SEQ ID NO: 82735 - DNA, 40 bp, Homo sapiens
gcactctcaaactggtagtagattttaaacctgcagtact

SEQ ID NO: 82736 - DNA, 40 bp, Homo sapiens
gtactgcaggtttaaaatctactaccagtttgagagtgcc

SEQ ID NO: 82737 - DNA, 40 bp, Homo sapiens
ggcactctcaaactggtagtagattttaaacctgcagtac

SEQ ID NO: 82738 - DNA, 40 bp, Homo sapiens
tactgcaggtttaaaatctactaccagtttgagagtgcca

SEQ ID NO: 82739 - DNA, 40 bp, Homo sapiens
tggcactctcaaactggtagtagattttaaacctgcagta

SEQ ID NO: 82740 - DNA, 40 bp, Homo sapiens
actgcaggtttaaaatctactaccagtttgagagtgccat

SEQ ID NO: 82741 - DNA, 40 bp, Homo sapiens
atggcactctcaaactggtagtagattttaaacctgcagt

SEQ ID NO: 82742 - DNA, 40 bp, Homo sapiens
ctgcaggtttaaaatctactaccagtttgagagtgccatt

SEQ ID NO: 82743 - DNA, 40 bp, Homo sapiens
aatggcactctcaaactggtagtagattttaaacctgcag

SEQ ID NO: 82744 - DNA, 40 bp, Homo sapiens
tgcaggtttaaaatctactaccagtttgagagtgccattt

SEQ ID NO: 82745 - DNA, 40 bp, Homo sapiens
aaatggcactctcaaactggtagtagattttaaacctgca

SEQ ID NO: 82746 - DNA, 40 bp, Homo sapiens
gcaggtttaaaatctactaccagtttgagagtgccatttt

SEQ ID NO: 82747 - DNA, 40 bp, Homo sapiens
aaaatggcactctcaaactggtagtagattttaaacctgc

SEQ ID NO: 82748 - DNA, 40 bp, Homo sapiens
caggtttaaaatctactaccagtttgagagtgccattttt

SEQ ID NO: 82749 - DNA, 40 bp, Homo sapiens
aaaaatggcactctcaaactggtagtagattttaaacctg

SEQ ID NO: 82750 - DNA, 40 bp, Homo sapiens
aggtttaaaatctactaccagtttgagagtgccatttttc

SEQ ID NO: 82751 - DNA, 40 bp, Homo sapiens
gaaaaatggcactctcaaactggtagtagattttaaacct

SEQ ID NO: 82752 - DNA, 40 bp, Homo sapiens
ggtttaaaatctactaccagtttgagagtgccatttttca

SEQ ID NO: 82753 - DNA, 40 bp, Homo sapiens
tgaaaaatggcactctcaaactggtagtagattttaaacc

SEQ ID NO: 82754 - DNA, 40 bp, Homo sapiens
gtttaaaatctactaccagtttgagagtgccatttttcac

SEQ ID NO: 82755 - DNA, 40 bp, Homo sapiens
gtgaaaaatggcactctcaaactggtagtagattttaaac

SEQ ID NO: 82756 - DNA, 40 bp, Homo sapiens
tttaaaatctactaccagtttgagagtgccatttttcaca

SEQ ID NO: 82757 - DNA, 40 bp, Homo sapiens
tgtgaaaaatggcactctcaaactggtagtagattttaaa

SEQ ID NO: 82758 - DNA, 40 bp, Homo sapiens
ttaaaatctactaccagtttgagagtgccatttttcacac

SEQ ID NO: 82759 - DNA, 40 bp, Homo sapiens
gtgtgaaaaatggcactctcaaactggtagtagattttaa

SEQ ID NO: 82760 - DNA, 40 bp, Homo sapiens
taaaatctactaccagtttgagagtgccatttttcacact

SEQ ID NO: 82761 - DNA, 40 bp, Homo sapiens
agtgtgaaaaatggcactctcaaactggtagtagatttta

SEQ ID NO: 82762 - DNA, 40 bp, Homo sapiens
aaaatctactaccagtttgagagtgccatttttcacactg

SEQ ID NO: 82763 - DNA, 40 bp, Homo sapiens
cagtgtgaaaaatggcactctcaaactggtagtagatttt

SEQ ID NO: 82764 - DNA, 40 bp, Homo sapiens
aaatctactaccagtttgagagtgccatttttcacactgt

SEQ ID NO: 82765 - DNA, 40 bp, Homo sapiens
acagtgtgaaaaatggcactctcaaactggtagtagattt

SEQ ID NO: 82766 - DNA, 40 bp, Homo sapiens
aatctactaccagtttgagagtgccatttttcacactgta

SEQ ID NO: 82767 - DNA, 40 bp, Homo sapiens
tacagtgtgaaaaatggcactctcaaactggtagtagatt

SEQ ID NO: 82768 - DNA, 40 bp, Homo sapiens
atctactaccagtttgagagtgccatttttcacactgtag

SEQ ID NO: 82769 - DNA, 40 bp, Homo sapiens
ctacagtgtgaaaaatggcactctcaaactggtagtagat

SEQ ID NO: 82770 - DNA, 40 bp, Homo sapiens
tctactaccagtttgagagtgccatttttcacactgtaga

SEQ ID NO: 82771 - DNA, 40 bp, Homo sapiens
tctacagtgtgaaaaatggcactctcaaactggtagtaga

SEQ ID NO: 82772 - DNA, 40 bp, Homo sapiens
ctactaccagtttgagagtgccatttttcacactgtagat

SEQ ID NO: 82773 - DNA, 40 bp, Homo sapiens
atctacagtgtgaaaaatggcactctcaaactggtagtag

SEQ ID NO: 82774 - DNA, 40 bp, Homo sapiens
tactaccagtttgagagtgccatttttcacactgtagatt

SEQ ID NO: 82775 - DNA, 40 bp, Homo sapiens
aatctacagtgtgaaaaatggcactctcaaactggtagta

SEQ ID NO: 82776 - DNA, 40 bp, Homo sapiens
actaccagtttgagagtgccatttttcacactgtagatta

SEQ ID NO: 82777 - DNA, 40 bp, Homo sapiens
taatctacagtgtgaaaaatggcactctcaaactggtagt

SEQ ID NO: 82778 - DNA, 40 bp, Homo sapiens
ctaccagtttgagagtgccatttttcacactgtagattat

SEQ ID NO: 82779 - DNA, 40 bp, Homo sapiens
ataatctacagtgtgaaaaatggcactctcaaactggtag

SEQ ID NO: 82780 - DNA, 40 bp, Homo sapiens
taccagtttgagagtgccatttttcacactgtagattatt

SEQ ID NO: 82781 - DNA, 40 bp, Homo sapiens
aataatctacagtgtgaaaaatggcactctcaaactggta

SEQ ID NO: 82782 - DNA, 40 bp, Homo sapiens
accagtttgagagtgccatttttcacactgtagattatta

SEQ ID NO: 82783 - DNA, 40 bp, Homo sapiens
taataatctacagtgtgaaaaatggcactctcaaactggt

SEQ ID NO: 82784 - DNA, 40 bp, Homo sapiens
ccagtttgagagtgccatttttcacactgtagattattag

SEQ ID NO: 82785 - DNA, 40 bp, Homo sapiens
ctaataatctacagtgtgaaaaatggcactctcaaactgg

SEQ ID NO: 82786 - DNA, 40 bp, Homo sapiens
cagtttgagagtgccatttttcacactgtagattattagg

SEQ ID NO: 82787 - DNA, 40 bp, Homo sapiens
cctaataatctacagtgtgaaaaatggcactctcaaactg

SEQ ID NO: 82788 - DNA, 40 bp, Homo sapiens
agtttgagagtgccatttttcacactgtagattattaggt

SEQ ID NO: 82789 - DNA, 40 bp, Homo sapiens
acctaataatctacagtgtgaaaaatggcactctcaaact

SEQ ID NO: 82790 - DNA, 40 bp, Homo sapiens
gtttgagagtgccatttttcacactgtagattattaggtt

SEQ ID NO: 82791 - DNA, 40 bp, Homo sapiens
aacctaataatctacagtgtgaaaaatggcactctcaaac

SEQ ID NO: 82792 - DNA, 40 bp, Homo sapiens
tttgagagtgccatttttcacactgtagattattaggttg

SEQ ID NO: 82793 - DNA, 40 bp, Homo sapiens
caacctaataatctacagtgtgaaaaatggcactctcaaa

SEQ ID NO: 82794 - DNA, 40 bp, Homo sapiens
ttgagagtgccatttttcacactgtagattattaggttga

SEQ ID NO: 82795 - DNA, 40 bp, Homo sapiens
tcaacctaataatctacagtgtgaaaaatggcactctcaa

SEQ ID NO: 82796 - DNA, 40 bp, Homo sapiens
tgagagtgccatttttcacactgtagattattaggttgaa

SEQ ID NO: 82797 - DNA, 40 bp, Homo sapiens
ttcaacctaataatctacagtgtgaaaaatggcactctca

SEQ ID NO: 82798 - DNA, 40 bp, Homo sapiens
gagagtgccatttttcacactgtagattattaggttgaaa

SEQ ID NO: 82799 - DNA, 40 bp, Homo sapiens
tttcaacctaataatctacagtgtgaaaaatggcactctc

SEQ ID NO: 82800 - DNA, 40 bp, Homo sapiens
agagtgccatttttcacactgtagattattaggttgaaaa

SEQ ID NO: 82801 - DNA, 40 bp, Homo sapiens
ttttcaacctaataatctacagtgtgaaaaatggcactct

SEQ ID NO: 82802 - DNA, 40 bp, Homo sapiens
gagtgccatttttcacactgtagattattaggttgaaaag

SEQ ID NO: 82803 - DNA, 40 bp, Homo sapiens
cttttcaacctaataatctacagtgtgaaaaatggcactc

SEQ ID NO: 82804 - DNA, 40 bp, Homo sapiens
agtgccatttttcacactgtagattattaggttgaaaagt

SEQ ID NO: 82805 - DNA, 40 bp, Homo sapiens
acttttcaacctaataatctacagtgtgaaaaatggcact

SEQ ID NO: 82806 - DNA, 40 bp, Homo sapiens
gtgccatttttcacactgtagattattaggttgaaaagta

SEQ ID NO: 82807 - DNA, 40 bp, Homo sapiens
tacttttcaacctaataatctacagtgtgaaaaatggcac

SEQ ID NO: 82808 - DNA, 40 bp, Homo sapiens
tgccatttttcacactgtagattattaggttgaaaagtat

SEQ ID NO: 82809 - DNA, 40 bp, Homo sapiens
atacttttcaacctaataatctacagtgtgaaaaatggca

SEQ ID NO: 82810 - DNA, 40 bp, Homo sapiens
gccatttttcacactgtagattattaggttgaaaagtatt

SEQ ID NO: 82811 - DNA, 40 bp, Homo sapiens
aatacttttcaacctaataatctacagtgtgaaaaatggc

SEQ ID NO: 82812 - DNA, 40 bp, Homo sapiens
ccatttttcacactgtagattattaggttgaaaagtatta

SEQ ID NO: 82813 - DNA, 40 bp, Homo sapiens
taatacttttcaacctaataatctacagtgtgaaaaatgg

SEQ ID NO: 82814 - DNA, 40 bp, Homo sapiens
catttttcacactgtagattattaggttgaaaagtattat

SEQ ID NO: 82815 - DNA, 40 bp, Homo sapiens
ataatacttttcaacctaataatctacagtgtgaaaaatg

SEQ ID NO: 82816 - DNA, 40 bp, Homo sapiens
atttttcacactgtagattattaggttgaaaagtattatg

SEQ ID NO: 82817 - DNA, 40 bp, Homo sapiens
cataatacttttcaacctaataatctacagtgtgaaaaat

SEQ ID NO: 82818 - DNA, 40 bp, Homo sapiens
tttttcacactgtagattattaggttgaaaagtattatgg

SEQ ID NO: 82819 - DNA, 40 bp, Homo sapiens
ccataatacttttcaacctaataatctacagtgtgaaaaa

SEQ ID NO: 82820 - DNA, 40 bp, Homo sapiens
ttttcacactgtagattattaggttgaaaagtattatggc

SEQ ID NO: 82821 - DNA, 40 bp, Homo sapiens
gccataatacttttcaacctaataatctacagtgtgaaaa

SEQ ID NO: 82822 - DNA, 40 bp, Homo sapiens
tttcacactgtagattattaggttgaaaagtattatggct

SEQ ID NO: 82823 - DNA, 40 bp, Homo sapiens
agccataatacttttcaacctaataatctacagtgtgaaa

SEQ ID NO: 82824 - DNA, 40 bp, Homo sapiens
ttcacactgtagattattaggttgaaaagtattatggctt

SEQ ID NO: 82825 - DNA, 40 bp, Homo sapiens
aagccataatacttttcaacctaataatctacagtgtgaa

SEQ ID NO: 82826 - DNA, 40 bp, Homo sapiens
tcacactgtagattattaggttgaaaagtattatggctta

SEQ ID NO: 82827 - DNA, 40 bp, Homo sapiens
taagccataatacttttcaacctaataatctacagtgtga

SEQ ID NO: 82828 - DNA, 40 bp, Homo sapiens
cacactgtagattattaggttgaaaagtattatggcttaa

SEQ ID NO: 82829 - DNA, 40 bp, Homo sapiens
ttaagccataatacttttcaacctaataatctacagtgtg

SEQ ID NO: 82830 - DNA, 40 bp, Homo sapiens
acactgtagattattaggttgaaaagtattatggcttaaa

SEQ ID NO: 82831 - DNA, 40 bp, Homo sapiens
tttaagccataatacttttcaacctaataatctacagtgt

SEQ ID NO: 82832 - DNA, 40 bp, Homo sapiens
cactgtagattattaggttgaaaagtattatggcttaaaa

SEQ ID NO: 82833 - DNA, 40 bp, Homo sapiens
ttttaagccataatacttttcaacctaataatctacagtg

SEQ ID NO: 82834 - DNA, 40 bp, Homo sapiens
actgtagattattaggttgaaaagtattatggcttaaaat

SEQ ID NO: 82835 - DNA, 40 bp, Homo sapiens
attttaagccataatacttttcaacctaataatctacagt

SEQ ID NO: 82836 - DNA, 40 bp, Homo sapiens
ctgtagattattaggttgaaaagtattatggcttaaaatc

SEQ ID NO: 82837 - DNA, 40 bp, Homo sapiens
gattttaagccataatacttttcaacctaataatctacag

SEQ ID NO: 82838 - DNA, 40 bp, Homo sapiens
tgtagattattaggttgaaaagtattatggcttaaaatcg

SEQ ID NO: 82839 - DNA, 40 bp, Homo sapiens
cgattttaagccataatacttttcaacctaataatctaca

SEQ ID NO: 82840 - DNA, 40 bp, Homo sapiens
gtagattattaggttgaaaagtattatggcttaaaatcgc

SEQ ID NO: 82841 - DNA, 40 bp, Homo sapiens
gcgattttaagccataatacttttcaacctaataatctac

SEQ ID NO: 82842 - DNA, 40 bp, Homo sapiens
tagattattaggttgaaaagtattatggcttaaaatcgct

SEQ ID NO: 82843 - DNA, 40 bp, Homo sapiens
agcgattttaagccataatacttttcaacctaataatcta

SEQ ID NO: 82844 - DNA, 40 bp, Homo sapiens
agattattaggttgaaaagtattatggcttaaaatcgctt

SEQ ID NO: 82845 - DNA, 40 bp, Homo sapiens
aagcgattttaagccataatacttttcaacctaataatct

SEQ ID NO: 82846 - DNA, 40 bp, Homo sapiens
gattattaggttgaaaagtattatggcttaaaatcgcttt

SEQ ID NO: 82847 - DNA, 40 bp, Homo sapiens
aaagcgattttaagccataatacttttcaacctaataatc

SEQ ID NO: 82848 - DNA, 40 bp, Homo sapiens
attattaggttgaaaagtattatggcttaaaatcgctttt

SEQ ID NO: 82849 - DNA, 40 bp, Homo sapiens
aaaagcgattttaagccataatacttttcaacctaataat

SEQ ID NO: 82850 - DNA, 40 bp, Homo sapiens
ttattaggttgaaaagtattatggcttaaaatcgctttta

SEQ ID NO: 82851 - DNA, 40 bp, Homo sapiens
taaaagcgattttaagccataatacttttcaacctaataa

SEQ ID NO: 82852 - DNA, 40 bp, Homo sapiens
tattaggttgaaaagtattatggcttaaaatcgcttttag

SEQ ID NO: 82853 - DNA, 40 bp, Homo sapiens
ctaaaagcgattttaagccataatacttttcaacctaata

SEQ ID NO: 82854 - DNA, 40 bp, Homo sapiens
attaggttgaaaagtattatggcttaaaatcgcttttagc

SEQ ID NO: 82855 - DNA, 40 bp, Homo sapiens
gctaaaagcgattttaagccataatacttttcaacctaat

SEQ ID NO: 82856 - DNA, 40 bp, Homo sapiens
ttaggttgaaaagtattatggcttaaaatcgcttttagcc

SEQ ID NO: 82857 - DNA, 40 bp, Homo sapiens
ggctaaaagcgattttaagccataatacttttcaacctaa

SEQ ID NO: 82858 - DNA, 40 bp, Homo sapiens
taggttgaaaagtattatggcttaaaatcgcttttagcca

SEQ ID NO: 82859 - DNA, 40 bp, Homo sapiens
tggctaaaagcgattttaagccataatacttttcaaccta

SEQ ID NO: 82860 - DNA, 40 bp, Homo sapiens
aggttgaaaagtattatggcttaaaatcgcttttagccat

SEQ ID NO: 82861 - DNA, 40 bp, Homo sapiens
atggctaaaagcgattttaagccataatacttttcaacct

SEQ ID NO: 82862 - DNA, 40 bp, Homo sapiens
ggttgaaaagtattatggcttaaaatcgcttttagccatt

SEQ ID NO: 82863 - DNA, 40 bp, Homo sapiens
aatggctaaaagcgattttaagccataatacttttcaacc

SEQ ID NO: 82864 - DNA, 40 bp, Homo sapiens
gttgaaaagtattatggcttaaaatcgcttttagccatta

SEQ ID NO: 82865 - DNA, 40 bp, Homo sapiens
taatggctaaaagcgattttaagccataatacttttcaac

SEQ ID NO: 82866 - DNA, 40 bp, Homo sapiens
ttgaaaagtattatggcttaaaatcgcttttagccattaa

SEQ ID NO: 82867 - DNA, 40 bp, Homo sapiens
ttaatggctaaaagcgattttaagccataatacttttcaa

SEQ ID NO: 82868 - DNA, 40 bp, Homo sapiens
tgaaaagtattatggcttaaaatcgcttttagccattaaa

SEQ ID NO: 82869 - DNA, 40 bp, Homo sapiens
tttaatggctaaaagcgattttaagccataatacttttca

SEQ ID NO: 82870 - DNA, 40 bp, Homo sapiens
gaaaagtattatggcttaaaatcgcttttagccattaaat

SEQ ID NO: 82871 - DNA, 40 bp, Homo sapiens
atttaatggctaaaagcgattttaagccataatacttttc

SEQ ID NO: 82872 - DNA, 40 bp, Homo sapiens
aaaagtattatggcttaaaatcgcttttagccattaaatt

SEQ ID NO: 82873 - DNA, 40 bp, Homo sapiens
aatttaatggctaaaagcgattttaagccataatactttt

SEQ ID NO: 82874 - DNA, 40 bp, Homo sapiens
aaagtattatggcttaaaatcgcttttagccattaaattt

SEQ ID NO: 82875 - DNA, 40 bp, Homo sapiens
aaatttaatggctaaaagcgattttaagccataatacttt

SEQ ID NO: 82876 - DNA, 40 bp, Homo sapiens
aagtattatggcttaaaatcgcttttagccattaaattta

SEQ ID NO: 82877 - DNA, 40 bp, Homo sapiens
taaatttaatggctaaaagcgattttaagccataatactt

SEQ ID NO: 82878 - DNA, 40 bp, Homo sapiens
agtattatggcttaaaatcgcttttagccattaaatttaa

SEQ ID NO: 82879 - DNA, 40 bp, Homo sapiens
ttaaatttaatggctaaaagcgattttaagccataatact

SEQ ID NO: 82880 - DNA, 40 bp, Homo sapiens
gtattatggcttaaaatcgcttttagccattaaatttaaa

SEQ ID NO: 82881 - DNA, 40 bp, Homo sapiens
tttaaatttaatggctaaaagcgattttaagccataatac

SEQ ID NO: 82882 - DNA, 40 bp, Homo sapiens
tattatggcttaaaatcgcttttagccattaaatttaaat

SEQ ID NO: 82883 - DNA, 40 bp, Homo sapiens
atttaaatttaatggctaaaagcgattttaagccataata

SEQ ID NO: 82884 - DNA, 40 bp, Homo sapiens
attatggcttaaaatcgcttttagccattaaatttaaata

SEQ ID NO: 82885 - DNA, 40 bp, Homo sapiens
tatttaaatttaatggctaaaagcgattttaagccataat

SEQ ID NO: 82886 - DNA, 40 bp, Homo sapiens
ttatggcttaaaatcgcttttagccattaaatttaaataa

SEQ ID NO: 82887 - DNA, 40 bp, Homo sapiens
ttatttaaatttaatggctaaaagcgattttaagccataa

SEQ ID NO: 82888 - DNA, 40 bp, Homo sapiens
tatggcttaaaatcgcttttagccattaaatttaaataac

SEQ ID NO: 82889 - DNA, 40 bp, Homo sapiens
gttatttaaatttaatggctaaaagcgattttaagccata

SEQ ID NO: 82890 - DNA, 40 bp, Homo sapiens
atggcttaaaatcgcttttagccattaaatttaaataacc

SEQ ID NO: 82891 - DNA, 40 bp, Homo sapiens
ggttatttaaatttaatggctaaaagcgattttaagccat

SEQ ID NO: 82892 - DNA, 40 bp, Homo sapiens
tggcttaaaatcgcttttagccattaaatttaaataacct

SEQ ID NO: 82893 - DNA, 40 bp, Homo sapiens
aggttatttaaatttaatggctaaaagcgattttaagcca

SEQ ID NO: 82894 - DNA, 40 bp, Homo sapiens
ggcttaaaatcgcttttagccattaaatttaaataacctt

SEQ ID NO: 82895 - DNA, 40 bp, Homo sapiens
aaggttatttaaatttaatggctaaaagcgattttaagcc

SEQ ID NO: 82896 - DNA, 40 bp, Homo sapiens
gcttaaaatcgcttttagccattaaatttaaataaccttg

SEQ ID NO: 82897 - DNA, 40 bp, Homo sapiens
caaggttatttaaatttaatggctaaaagcgattttaagc

SEQ ID NO: 82898 - DNA, 40 bp, Homo sapiens
cttaaaatcgcttttagccattaaatttaaataaccttgc

SEQ ID NO: 82899 - DNA, 40 bp, Homo sapiens
gcaaggttatttaaatttaatggctaaaagcgattttaag

SEQ ID NO: 82900 - DNA, 40 bp, Homo sapiens
ttaaaatcgcttttagccattaaatttaaataaccttgct

SEQ ID NO: 82901 - DNA, 40 bp, Homo sapiens
agcaaggttatttaaatttaatggctaaaagcgattttaa

SEQ ID NO: 82902 - DNA, 40 bp, Homo sapiens
taaaatcgcttttagccattaaatttaaataaccttgctt

SEQ ID NO: 82903 - DNA, 40 bp, Homo sapiens
aagcaaggttatttaaatttaatggctaaaagcgatttta

SEQ ID NO: 82904 - DNA, 40 bp, Homo sapiens
aaaatcgcttttagccattaaatttaaataaccttgcttt

SEQ ID NO: 82905 - DNA, 40 bp, Homo sapiens
aaagcaaggttatttaaatttaatggctaaaagcgatttt

SEQ ID NO: 82906 - DNA, 40 bp, Homo sapiens
aaatcgcttttagccattaaatttaaataaccttgcttta

SEQ ID NO: 82907 - DNA, 40 bp, Homo sapiens
taaagcaaggttatttaaatttaatggctaaaagcgattt

SEQ ID NO: 82908 - DNA, 40 bp, Homo sapiens
aatcgcttttagccattaaatttaaataaccttgctttaa

SEQ ID NO: 82909 - DNA, 40 bp, Homo sapiens
ttaaagcaaggttatttaaatttaatggctaaaagcgatt

SEQ ID NO: 82910 - DNA, 40 bp, Homo sapiens
atcgcttttagccattaaatttaaataaccttgctttaat

SEQ ID NO: 82911 - DNA, 40 bp, Homo sapiens
attaaagcaaggttatttaaatttaatggctaaaagcgat

SEQ ID NO: 82912 - DNA, 40 bp, Homo sapiens
tcgcttttagccattaaatttaaataaccttgctttaatc

SEQ ID NO: 82913 - DNA, 40 bp, Homo sapiens
gattaaagcaaggttatttaaatttaatggctaaaagcga

SEQ ID NO: 82914 - DNA, 40 bp, Homo sapiens
cgcttttagccattaaatttaaataaccttgctttaatca

SEQ ID NO: 82915 - DNA, 40 bp, Homo sapiens
tgattaaagcaaggttatttaaatttaatggctaaaagcg

SEQ ID NO: 82916 - DNA, 40 bp, Homo sapiens
gcttttagccattaaatttaaataaccttgctttaatcat

SEQ ID NO: 82917 - DNA, 40 bp, Homo sapiens
atgattaaagcaaggttatttaaatttaatggctaaaagc

SEQ ID NO: 82918 - DNA, 40 bp, Homo sapiens
cttttagccattaaatttaaataaccttgctttaatcata

SEQ ID NO: 82919 - DNA, 40 bp, Homo sapiens
tatgattaaagcaaggttatttaaatttaatggctaaaag

SEQ ID NO: 82920 - DNA, 40 bp, Homo sapiens
ttttagccattaaatttaaataaccttgctttaatcataa

SEQ ID NO: 82921 - DNA, 40 bp, Homo sapiens
ttatgattaaagcaaggttatttaaatttaatggctaaaa

SEQ ID NO: 82922 - DNA, 40 bp, Homo sapiens
tttagccattaaatttaaataaccttgctttaatcataaa

SEQ ID NO: 82923 - DNA, 40 bp, Homo sapiens
tttatgattaaagcaaggttatttaaatttaatggctaaa

SEQ ID NO: 82924 - DNA, 40 bp, Homo sapiens
ttagccattaaatttaaataaccttgctttaatcataaat

SEQ ID NO: 82925 - DNA, 40 bp, Homo sapiens
atttatgattaaagcaaggttatttaaatttaatggctaa

SEQ ID NO: 82926 - DNA, 40 bp, Homo sapiens
tagccattaaatttaaataaccttgctttaatcataaata

SEQ ID NO: 82927 - DNA, 40 bp, Homo sapiens
tatttatgattaaagcaaggttatttaaatttaatggcta

SEQ ID NO: 82928 - DNA, 40 bp, Homo sapiens
agccattaaatttaaataaccttgctttaatcataaatag

SEQ ID NO: 82929 - DNA, 40 bp, Homo sapiens
ctatttatgattaaagcaaggttatttaaatttaatggct

SEQ ID NO: 82930 - DNA, 40 bp, Homo sapiens
gccattaaatttaaataaccttgctttaatcataaataga

SEQ ID NO: 82931 - DNA, 40 bp, Homo sapiens
tctatttatgattaaagcaaggttatttaaatttaatggc

SEQ ID NO: 82932 - DNA, 40 bp, Homo sapiens
ccattaaatttaaataaccttgctttaatcataaatagat

SEQ ID NO: 82933 - DNA, 40 bp, Homo sapiens
atctatttatgattaaagcaaggttatttaaatttaatgg

SEQ ID NO: 82934 - DNA, 40 bp, Homo sapiens
cattaaatttaaataaccttgctttaatcataaatagatg

SEQ ID NO: 82935 - DNA, 40 bp, Homo sapiens
catctatttatgattaaagcaaggttatttaaatttaatg

SEQ ID NO: 82936 - DNA, 40 bp, Homo sapiens
attaaatttaaataaccttgctttaatcataaatagatgg

SEQ ID NO: 82937 - DNA, 40 bp, Homo sapiens
ccatctatttatgattaaagcaaggttatttaaatttaat

SEQ ID NO: 82938 - DNA, 40 bp, Homo sapiens
ttaaatttaaataaccttgctttaatcataaatagatggt

SEQ ID NO: 82939 - DNA, 40 bp, Homo sapiens
accatctatttatgattaaagcaaggttatttaaatttaa

SEQ ID NO: 82940 - DNA, 40 bp, Homo sapiens
taaatttaaataaccttgctttaatcataaatagatggtg

SEQ ID NO: 82941 - DNA, 40 bp, Homo sapiens
caccatctatttatgattaaagcaaggttatttaaattta

SEQ ID NO: 82942 - DNA, 40 bp, Homo sapiens
aaatttaaataaccttgctttaatcataaatagatggtgg

SEQ ID NO: 82943 - DNA, 40 bp, Homo sapiens
ccaccatctatttatgattaaagcaaggttatttaaattt

SEQ ID NO: 82944 - DNA, 40 bp, Homo sapiens
aatttaaataaccttgctttaatcataaatagatggtggt

SEQ ID NO: 82945 - DNA, 40 bp, Homo sapiens
accaccatctatttatgattaaagcaaggttatttaaatt

SEQ ID NO: 82946 - DNA, 40 bp, Homo sapiens
atttaaataaccttgctttaatcataaatagatggtggtc

SEQ ID NO: 82947 - DNA, 40 bp, Homo sapiens
gaccaccatctatttatgattaaagcaaggttatttaaat

SEQ ID NO: 82948 - DNA, 40 bp, Homo sapiens
tttaaataaccttgctttaatcataaatagatggtggtca

SEQ ID NO: 82949 - DNA, 40 bp, Homo sapiens
tgaccaccatctatttatgattaaagcaaggttatttaaa

SEQ ID NO: 82950 - DNA, 40 bp, Homo sapiens
ttaaataaccttgctttaatcataaatagatggtggtcac

SEQ ID NO: 82951 - DNA, 40 bp, Homo sapiens
gtgaccaccatctatttatgattaaagcaaggttatttaa

SEQ ID NO: 82952 - DNA, 40 bp, Homo sapiens
taaataaccttgctttaatcataaatagatggtggtcaca

SEQ ID NO: 82953 - DNA, 40 bp, Homo sapiens
tgtgaccaccatctatttatgattaaagcaaggttattta

SEQ ID NO: 82954 - DNA, 40 bp, Homo sapiens
aaataaccttgctttaatcataaatagatggtggtcacaa

SEQ ID NO: 82955 - DNA, 40 bp, Homo sapiens
ttgtgaccaccatctatttatgattaaagcaaggttattt

SEQ ID NO: 82956 - DNA, 40 bp, Homo sapiens
aataaccttgctttaatcataaatagatggtggtcacaat

SEQ ID NO: 82957 - DNA, 40 bp, Homo sapiens
attgtgaccaccatctatttatgattaaagcaaggttatt

SEQ ID NO: 82958 - DNA, 40 bp, Homo sapiens
ataaccttgctttaatcataaatagatggtggtcacaatg

SEQ ID NO: 82959 - DNA, 40 bp, Homo sapiens
cattgtgaccaccatctatttatgattaaagcaaggttat

SEQ ID NO: 82960 - DNA, 40 bp, Homo sapiens
taaccttgctttaatcataaatagatggtggtcacaatga

SEQ ID NO: 82961 - DNA, 40 bp, Homo sapiens
tcattgtgaccaccatctatttatgattaaagcaaggtta

SEQ ID NO: 82962 - DNA, 40 bp, Homo sapiens
aaccttgctttaatcataaatagatggtggtcacaatgac

SEQ ID NO: 82963 - DNA, 40 bp, Homo sapiens
gtcattgtgaccaccatctatttatgattaaagcaaggtt

SEQ ID NO: 82964 - DNA, 40 bp, Homo sapiens
accttgctttaatcataaatagatggtggtcacaatgact

SEQ ID NO: 82965 - DNA, 40 bp, Homo sapiens
agtcattgtgaccaccatctatttatgattaaagcaaggt

SEQ ID NO: 82966 - DNA, 40 bp, Homo sapiens
ccttgctttaatcataaatagatggtggtcacaatgacta

SEQ ID NO: 82967 - DNA, 40 bp, Homo sapiens
tagtcattgtgaccaccatctatttatgattaaagcaagg

SEQ ID NO: 82968 - DNA, 40 bp, Homo sapiens
cttgctttaatcataaatagatggtggtcacaatgactaa

SEQ ID NO: 82969 - DNA, 40 bp, Homo sapiens
ttagtcattgtgaccaccatctatttatgattaaagcaag

SEQ ID NO: 82970 - DNA, 40 bp, Homo sapiens
ttgctttaatcataaatagatggtggtcacaatgactaac

SEQ ID NO: 82971 - DNA, 40 bp, Homo sapiens
gttagtcattgtgaccaccatctatttatgattaaagcaa

SEQ ID NO: 82972 - DNA, 40 bp, Homo sapiens
tgctttaatcataaatagatggtggtcacaatgactaact

SEQ ID NO: 82973 - DNA, 40 bp, Homo sapiens
agttagtcattgtgaccaccatctatttatgattaaagca

SEQ ID NO: 82974 - DNA, 40 bp, Homo sapiens
gctttaatcataaatagatggtggtcacaatgactaactg

SEQ ID NO: 82975 - DNA, 40 bp, Homo sapiens
cagttagtcattgtgaccaccatctatttatgattaaagc

SEQ ID NO: 82976 - DNA, 40 bp, Homo sapiens
ctttaatcataaatagatggtggtcacaatgactaactgt

SEQ ID NO: 82977 - DNA, 40 bp, Homo sapiens
acagttagtcattgtgaccaccatctatttatgattaaag

SEQ ID NO: 82978 - DNA, 40 bp, Homo sapiens
tttaatcataaatagatggtggtcacaatgactaactgtt

SEQ ID NO: 82979 - DNA, 40 bp, Homo sapiens
aacagttagtcattgtgaccaccatctatttatgattaaa

SEQ ID NO: 82980 - DNA, 40 bp, Homo sapiens
ttaatcataaatagatggtggtcacaatgactaactgtta

SEQ ID NO: 82981 - DNA, 40 bp, Homo sapiens
taacagttagtcattgtgaccaccatctatttatgattaa

SEQ ID NO: 82982 - DNA, 40 bp, Homo sapiens
taatcataaatagatggtggtcacaatgactaactgttaa

SEQ ID NO: 82983 - DNA, 40 bp, Homo sapiens
ttaacagttagtcattgtgaccaccatctatttatgatta

SEQ ID NO: 82984 - DNA, 40 bp, Homo sapiens
aatcataaatagatggtggtcacaatgactaactgttaaa

SEQ ID NO: 82985 - DNA, 40 bp, Homo sapiens
tttaacagttagtcattgtgaccaccatctatttatgatt

SEQ ID NO: 82986 - DNA, 40 bp, Homo sapiens
atcataaatagatggtggtcacaatgactaactgttaaac

SEQ ID NO: 82987 - DNA, 40 bp, Homo sapiens
gtttaacagttagtcattgtgaccaccatctatttatgat

SEQ ID NO: 82988 - DNA, 40 bp, Homo sapiens
tcataaatagatggtggtcacaatgactaactgttaaact

SEQ ID NO: 82989 - DNA, 40 bp, Homo sapiens
agtttaacagttagtcattgtgaccaccatctatttatga

SEQ ID NO: 82990 - DNA, 40 bp, Homo sapiens
cataaatagatggtggtcacaatgactaactgttaaactc

SEQ ID NO: 82991 - DNA, 40 bp, Homo sapiens
gagtttaacagttagtcattgtgaccaccatctatttatg

SEQ ID NO: 82992 - DNA, 40 bp, Homo sapiens
ataaatagatggtggtcacaatgactaactgttaaactct

SEQ ID NO: 82993 - DNA, 40 bp, Homo sapiens
agagtttaacagttagtcattgtgaccaccatctatttat

SEQ ID NO: 82994 - DNA, 40 bp, Homo sapiens
taaatagatggtggtcacaatgactaactgttaaactctt

SEQ ID NO: 82995 - DNA, 40 bp, Homo sapiens
aagagtttaacagttagtcattgtgaccaccatctattta

SEQ ID NO: 82996 - DNA, 40 bp, Homo sapiens
aaatagatggtggtcacaatgactaactgttaaactcttt

SEQ ID NO: 82997 - DNA, 40 bp, Homo sapiens
aaagagtttaacagttagtcattgtgaccaccatctattt

SEQ ID NO: 82998 - DNA, 40 bp, Homo sapiens
aatagatggtggtcacaatgactaactgttaaactctttg

SEQ ID NO: 82999 - DNA, 40 bp, Homo sapiens
caaagagtttaacagttagtcattgtgaccaccatctatt

SEQ ID NO: 83000 - DNA, 40 bp, Homo sapiens
atagatggtggtcacaatgactaactgttaaactctttga

SEQ ID NO: 83001 - DNA, 40 bp, Homo sapiens
tcaaagagtttaacagttagtcattgtgaccaccatctat

SEQ ID NO: 83002 - DNA, 40 bp, Homo sapiens
tagatggtggtcacaatgactaactgttaaactctttgaa

SEQ ID NO: 83003 - DNA, 40 bp, Homo sapiens
ttcaaagagtttaacagttagtcattgtgaccaccatcta

SEQ ID NO: 83004 - DNA, 40 bp, Homo sapiens
agatggtggtcacaatgactaactgttaaactctttgaag

SEQ ID NO: 83005 - DNA, 40 bp, Homo sapiens
cttcaaagagtttaacagttagtcattgtgaccaccatct

SEQ ID NO: 83006 - DNA, 40 bp, Homo sapiens
gatggtggtcacaatgactaactgttaaactctttgaaga

SEQ ID NO: 83007 - DNA, 40 bp, Homo sapiens
tcttcaaagagtttaacagttagtcattgtgaccaccatc

SEQ ID NO: 83008 - DNA, 40 bp, Homo sapiens
atggtggtcacaatgactaactgttaaactctttgaagac

SEQ ID NO: 83009 - DNA, 40 bp, Homo sapiens
gtcttcaaagagtttaacagttagtcattgtgaccaccat

SEQ ID NO: 83010 - DNA, 40 bp, Homo sapiens
tggtggtcacaatgactaactgttaaactctttgaagaca

SEQ ID NO: 83011 - DNA, 40 bp, Homo sapiens
tgtcttcaaagagtttaacagttagtcattgtgaccacca

SEQ ID NO: 83012 - DNA, 40 bp, Homo sapiens
ggtggtcacaatgactaactgttaaactctttgaagacag

SEQ ID NO: 83013 - DNA, 40 bp, Homo sapiens
ctgtcttcaaagagtttaacagttagtcattgtgaccacc

SEQ ID NO: 83014 - DNA, 40 bp, Homo sapiens
gtggtcacaatgactaactgttaaactctttgaagacagg

SEQ ID NO: 83015 - DNA, 40 bp, Homo sapiens
cctgtcttcaaagagtttaacagttagtcattgtgaccac

SEQ ID NO: 83016 - DNA, 40 bp, Homo sapiens
tggtcacaatgactaactgttaaactctttgaagacagga

SEQ ID NO: 83017 - DNA, 40 bp, Homo sapiens
tcctgtcttcaaagagtttaacagttagtcattgtgacca

SEQ ID NO: 83018 - DNA, 40 bp, Homo sapiens
ggtcacaatgactaactgttaaactctttgaagacaggat

SEQ ID NO: 83019 - DNA, 40 bp, Homo sapiens
atcctgtcttcaaagagtttaacagttagtcattgtgacc

SEQ ID NO: 83020 - DNA, 40 bp, Homo sapiens
gtcacaatgactaactgttaaactctttgaagacaggata

SEQ ID NO: 83021 - DNA, 40 bp, Homo sapiens
tatcctgtcttcaaagagtttaacagttagtcattgtgac

SEQ ID NO: 83022 - DNA, 40 bp, Homo sapiens
tcacaatgactaactgttaaactctttgaagacaggatat

SEQ ID NO: 83023 - DNA, 40 bp, Homo sapiens
atatcctgtcttcaaagagtttaacagttagtcattgtga

SEQ ID NO: 83024 - DNA, 40 bp, Homo sapiens
cacaatgactaactgttaaactctttgaagacaggatatt

SEQ ID NO: 83025 - DNA, 40 bp, Homo sapiens
aatatcctgtcttcaaagagtttaacagttagtcattgtg

SEQ ID NO: 83026 - DNA, 40 bp, Homo sapiens
acaatgactaactgttaaactctttgaagacaggatattt

SEQ ID NO: 83027 - DNA, 40 bp, Homo sapiens
aaatatcctgtcttcaaagagtttaacagttagtcattgt

SEQ ID NO: 83028 - DNA, 40 bp, Homo sapiens
caatgactaactgttaaactctttgaagacaggatatttg

SEQ ID NO: 83029 - DNA, 40 bp, Homo sapiens
caaatatcctgtcttcaaagagtttaacagttagtcattg

SEQ ID NO: 83030 - DNA, 40 bp, Homo sapiens
aatgactaactgttaaactctttgaagacaggatatttgg

SEQ ID NO: 83031 - DNA, 40 bp, Homo sapiens
ccaaatatcctgtcttcaaagagtttaacagttagtcatt

SEQ ID NO: 83032 - DNA, 40 bp, Homo sapiens
atgactaactgttaaactctttgaagacaggatatttggc

SEQ ID NO: 83033 - DNA, 40 bp, Homo sapiens
gccaaatatcctgtcttcaaagagtttaacagttagtcat

SEQ ID NO: 83034 - DNA, 40 bp, Homo sapiens
tgactaactgttaaactctttgaagacaggatatttggct

SEQ ID NO: 83035 - DNA, 40 bp, Homo sapiens
agccaaatatcctgtcttcaaagagtttaacagttagtca

SEQ ID NO: 83036 - DNA, 40 bp, Homo sapiens
gactaactgttaaactctttgaagacaggatatttggctt

SEQ ID NO: 83037 - DNA, 40 bp, Homo sapiens
aagccaaatatcctgtcttcaaagagtttaacagttagtc

SEQ ID NO: 83038 - DNA, 40 bp, Homo sapiens
actaactgttaaactctttgaagacaggatatttggcttt

SEQ ID NO: 83039 - DNA, 40 bp, Homo sapiens
aaagccaaatatcctgtcttcaaagagtttaacagttagt

SEQ ID NO: 83040 - DNA, 40 bp, Homo sapiens
ctaactgttaaactctttgaagacaggatatttggcttta

SEQ ID NO: 83041 - DNA, 40 bp, Homo sapiens
taaagccaaatatcctgtcttcaaagagtttaacagttag

SEQ ID NO: 83042 - DNA, 40 bp, Homo sapiens
taactgttaaactctttgaagacaggatatttggctttat

SEQ ID NO: 83043 - DNA, 40 bp, Homo sapiens
ataaagccaaatatcctgtcttcaaagagtttaacagtta

SEQ ID NO: 83044 - DNA, 40 bp, Homo sapiens
aactgttaaactctttgaagacaggatatttggctttata

SEQ ID NO: 83045 - DNA, 40 bp, Homo sapiens
tataaagccaaatatcctgtcttcaaagagtttaacagtt

SEQ ID NO: 83046 - DNA, 40 bp, Homo sapiens
actgttaaactctttgaagacaggatatttggctttatat

SEQ ID NO: 83047 - DNA, 40 bp, Homo sapiens
atataaagccaaatatcctgtcttcaaagagtttaacagt

SEQ ID NO: 83048 - DNA, 40 bp, Homo sapiens
ctgttaaactctttgaagacaggatatttggctttatatg

SEQ ID NO: 83049 - DNA, 40 bp, Homo sapiens
catataaagccaaatatcctgtcttcaaagagtttaacag

SEQ ID NO: 83050 - DNA, 40 bp, Homo sapiens
tgttaaactctttgaagacaggatatttggctttatatgg

SEQ ID NO: 83051 - DNA, 40 bp, Homo sapiens
ccatataaagccaaatatcctgtcttcaaagagtttaaca

SEQ ID NO: 83052 - DNA, 40 bp, Homo sapiens
gttaaactctttgaagacaggatatttggctttatatggc

SEQ ID NO: 83053 - DNA, 40 bp, Homo sapiens
gccatataaagccaaatatcctgtcttcaaagagtttaac

SEQ ID NO: 83054 - DNA, 40 bp, Homo sapiens
ttaaactctttgaagacaggatatttggctttatatggca

SEQ ID NO: 83055 - DNA, 40 bp, Homo sapiens
tgccatataaagccaaatatcctgtcttcaaagagtttaa

SEQ ID NO: 83056 - DNA, 40 bp, Homo sapiens
taaactctttgaagacaggatatttggctttatatggcaa

SEQ ID NO: 83057 - DNA, 40 bp, Homo sapiens
ttgccatataaagccaaatatcctgtcttcaaagagttta

SEQ ID NO: 83058 - DNA, 40 bp, Homo sapiens
aaactctttgaagacaggatatttggctttatatggcaag

SEQ ID NO: 83059 - DNA, 40 bp, Homo sapiens
cttgccatataaagccaaatatcctgtcttcaaagagttt

SEQ ID NO: 83060 - DNA, 40 bp, Homo sapiens
aactctttgaagacaggatatttggctttatatggcaagc

SEQ ID NO: 83061 - DNA, 40 bp, Homo sapiens
gcttgccatataaagccaaatatcctgtcttcaaagagtt

SEQ ID NO: 83062 - DNA, 40 bp, Homo sapiens
actctttgaagacaggatatttggctttatatggcaagct

SEQ ID NO: 83063 - DNA, 40 bp, Homo sapiens
agcttgccatataaagccaaatatcctgtcttcaaagagt

SEQ ID NO: 83064 - DNA, 40 bp, Homo sapiens
ctctttgaagacaggatatttggctttatatggcaagctt

SEQ ID NO: 83065 - DNA, 40 bp, Homo sapiens
aagcttgccatataaagccaaatatcctgtcttcaaagag

SEQ ID NO: 83066 - DNA, 40 bp, Homo sapiens
tctttgaagacaggatatttggctttatatggcaagcttt

SEQ ID NO: 83067 - DNA, 40 bp, Homo sapiens
aaagcttgccatataaagccaaatatcctgtcttcaaaga

SEQ ID NO: 83068 - DNA, 40 bp, Homo sapiens
ctttgaagacaggatatttggctttatatggcaagctttt

SEQ ID NO: 83069 - DNA, 40 bp, Homo sapiens
aaaagcttgccatataaagccaaatatcctgtcttcaaag

SEQ ID NO: 83070 - DNA, 40 bp, Homo sapiens
tttgaagacaggatatttggctttatatggcaagcttttg

SEQ ID NO: 83071 - DNA, 40 bp, Homo sapiens
caaaagcttgccatataaagccaaatatcctgtcttcaaa

SEQ ID NO: 83072 - DNA, 40 bp, Homo sapiens
ttgaagacaggatatttggctttatatggcaagcttttga

SEQ ID NO: 83073 - DNA, 40 bp, Homo sapiens
tcaaaagcttgccatataaagccaaatatcctgtcttcaa

SEQ ID NO: 83074 - DNA, 40 bp, Homo sapiens
tgaagacaggatatttggctttatatggcaagcttttgaa

SEQ ID NO: 83075 - DNA, 40 bp, Homo sapiens
ttcaaaagcttgccatataaagccaaatatcctgtcttca

SEQ ID NO: 83076 - DNA, 40 bp, Homo sapiens
gaagacaggatatttggctttatatggcaagcttttgaat

SEQ ID NO: 83077 - DNA, 40 bp, Homo sapiens
attcaaaagcttgccatataaagccaaatatcctgtcttc

SEQ ID NO: 83078 - DNA, 40 bp, Homo sapiens
aagacaggatatttggctttatatggcaagcttttgaata

SEQ ID NO: 83079 - DNA, 40 bp, Homo sapiens
tattcaaaagcttgccatataaagccaaatatcctgtctt

SEQ ID NO: 83080 - DNA, 40 bp, Homo sapiens
agacaggatatttggctttatatggcaagcttttgaatac

SEQ ID NO: 83081 - DNA, 40 bp, Homo sapiens
gtattcaaaagcttgccatataaagccaaatatcctgtct

SEQ ID NO: 83082 - DNA, 40 bp, Homo sapiens
gacaggatatttggctttatatggcaagcttttgaataca

SEQ ID NO: 83083 - DNA, 40 bp, Homo sapiens
tgtattcaaaagcttgccatataaagccaaatatcctgtc

SEQ ID NO: 83084 - DNA, 40 bp, Homo sapiens
acaggatatttggctttatatggcaagcttttgaatacaa

SEQ ID NO: 83085 - DNA, 40 bp, Homo sapiens
ttgtattcaaaagcttgccatataaagccaaatatcctgt

SEQ ID NO: 83086 - DNA, 40 bp, Homo sapiens
caggatatttggctttatatggcaagcttttgaatacaac

SEQ ID NO: 83087 - DNA, 40 bp, Homo sapiens
gttgtattcaaaagcttgccatataaagccaaatatcctg

SEQ ID NO: 83088 - DNA, 40 bp, Homo sapiens
aggatatttggctttatatggcaagcttttgaatacaaca

SEQ ID NO: 83089 - DNA, 40 bp, Homo sapiens
tgttgtattcaaaagcttgccatataaagccaaatatcct

SEQ ID NO: 83090 - DNA, 40 bp, Homo sapiens
ggatatttggctttatatggcaagcttttgaatacaacag

SEQ ID NO: 83091 - DNA, 40 bp, Homo sapiens
ctgttgtattcaaaagcttgccatataaagccaaatatcc

SEQ ID NO: 83092 - DNA, 40 bp, Homo sapiens
gatatttggctttatatggcaagcttttgaatacaacaga

SEQ ID NO: 83093 - DNA, 40 bp, Homo sapiens
tctgttgtattcaaaagcttgccatataaagccaaatatc

SEQ ID NO: 83094 - DNA, 40 bp, Homo sapiens
atatttggctttatatggcaagcttttgaatacaacagaa

SEQ ID NO: 83095 - DNA, 40 bp, Homo sapiens
ttctgttgtattcaaaagcttgccatataaagccaaatat

SEQ ID NO: 83096 - DNA, 40 bp, Homo sapiens
tatttggctttatatggcaagcttttgaatacaacagaaa

SEQ ID NO: 83097 - DNA, 40 bp, Homo sapiens
tttctgttgtattcaaaagcttgccatataaagccaaata

SEQ ID NO: 83098 - DNA, 40 bp, Homo sapiens
atttggctttatatggcaagcttttgaatacaacagaaat

SEQ ID NO: 83099 - DNA, 40 bp, Homo sapiens
atttctgttgtattcaaaagcttgccatataaagccaaat

SEQ ID NO: 83100 - DNA, 40 bp, Homo sapiens
tttggctttatatggcaagcttttgaatacaacagaaatt

SEQ ID NO: 83101 - DNA, 40 bp, Homo sapiens
aatttctgttgtattcaaaagcttgccatataaagccaaa

SEQ ID NO: 83102 - DNA, 40 bp, Homo sapiens
ttggctttatatggcaagcttttgaatacaacagaaatta

SEQ ID NO: 83103 - DNA, 40 bp, Homo sapiens
taatttctgttgtattcaaaagcttgccatataaagccaa

SEQ ID NO: 83104 - DNA, 40 bp, Homo sapiens
tggctttatatggcaagcttttgaatacaacagaaattaa

SEQ ID NO: 83105 - DNA, 40 bp, Homo sapiens
ttaatttctgttgtattcaaaagcttgccatataaagcca

SEQ ID NO: 83106 - DNA, 40 bp, Homo sapiens
ggctttatatggcaagcttttgaatacaacagaaattaaa

SEQ ID NO: 83107 - DNA, 40 bp, Homo sapiens
tttaatttctgttgtattcaaaagcttgccatataaagcc

SEQ ID NO: 83108 - DNA, 40 bp, Homo sapiens
gctttatatggcaagcttttgaatacaacagaaattaaaa

SEQ ID NO: 83109 - DNA, 40 bp, Homo sapiens
ttttaatttctgttgtattcaaaagcttgccatataaagc

SEQ ID NO: 83110 - DNA, 40 bp, Homo sapiens
ctttatatggcaagcttttgaatacaacagaaattaaaac

SEQ ID NO: 83111 - DNA, 40 bp, Homo sapiens
gttttaatttctgttgtattcaaaagcttgccatataaag

SEQ ID NO: 83112 - DNA, 40 bp, Homo sapiens
tttatatggcaagcttttgaatacaacagaaattaaaact

SEQ ID NO: 83113 - DNA, 40 bp, Homo sapiens
agttttaatttctgttgtattcaaaagcttgccatataaa

SEQ ID NO: 83114 - DNA, 40 bp, Homo sapiens
ttatatggcaagcttttgaatacaacagaaattaaaactt

SEQ ID NO: 83115 - DNA, 40 bp, Homo sapiens
aagttttaatttctgttgtattcaaaagcttgccatataa

SEQ ID NO: 83116 - DNA, 40 bp, Homo sapiens
tatatggcaagcttttgaatacaacagaaattaaaacttt

SEQ ID NO: 83117 - DNA, 40 bp, Homo sapiens
aaagttttaatttctgttgtattcaaaagcttgccatata

SEQ ID NO: 83118 - DNA, 40 bp, Homo sapiens
atatggcaagcttttgaatacaacagaaattaaaacttta

SEQ ID NO: 83119 - DNA, 40 bp, Homo sapiens
taaagttttaatttctgttgtattcaaaagcttgccatat

SEQ ID NO: 83120 - DNA, 40 bp, Homo sapiens
tatggcaagcttttgaatacaacagaaattaaaactttat

SEQ ID NO: 83121 - DNA, 40 bp, Homo sapiens
ataaagttttaatttctgttgtattcaaaagcttgccata

SEQ ID NO: 83122 - DNA, 40 bp, Homo sapiens
atggcaagcttttgaatacaacagaaattaaaactttatg

SEQ ID NO: 83123 - DNA, 40 bp, Homo sapiens
cataaagttttaatttctgttgtattcaaaagcttgccat

SEQ ID NO: 83124 - DNA, 40 bp, Homo sapiens
tggcaagcttttgaatacaacagaaattaaaactttatgg

SEQ ID NO: 83125 - DNA, 40 bp, Homo sapiens
ccataaagttttaatttctgttgtattcaaaagcttgcca

SEQ ID NO: 83126 - DNA, 40 bp, Homo sapiens
ggcaagcttttgaatacaacagaaattaaaactttatggg

SEQ ID NO: 83127 - DNA, 40 bp, Homo sapiens
cccataaagttttaatttctgttgtattcaaaagcttgcc

SEQ ID NO: 83128 - DNA, 40 bp, Homo sapiens
gcaagcttttgaatacaacagaaattaaaactttatggga

SEQ ID NO: 83129 - DNA, 40 bp, Homo sapiens
tcccataaagttttaatttctgttgtattcaaaagcttgc

SEQ ID NO: 83130 - DNA, 40 bp, Homo sapiens
caagcttttgaatacaacagaaattaaaactttatgggat

SEQ ID NO: 83131 - DNA, 40 bp, Homo sapiens
atcccataaagttttaatttctgttgtattcaaaagcttg

SEQ ID NO: 83132 - DNA, 40 bp, Homo sapiens
aagcttttgaatacaacagaaattaaaactttatgggata

SEQ ID NO: 83133 - DNA, 40 bp, Homo sapiens
tatcccataaagttttaatttctgttgtattcaaaagctt

SEQ ID NO: 83134 - DNA, 40 bp, Homo sapiens
agcttttgaatacaacagaaattaaaactttatgggatag

SEQ ID NO: 83135 - DNA, 40 bp, Homo sapiens
ctatcccataaagttttaatttctgttgtattcaaaagct

SEQ ID NO: 83136 - DNA, 40 bp, Homo sapiens
gcttttgaatacaacagaaattaaaactttatgggataga

SEQ ID NO: 83137 - DNA, 40 bp, Homo sapiens
tctatcccataaagttttaatttctgttgtattcaaaagc

SEQ ID NO: 83138 - DNA, 40 bp, Homo sapiens
cttttgaatacaacagaaattaaaactttatgggatagaa

SEQ ID NO: 83139 - DNA, 40 bp, Homo sapiens
ttctatcccataaagttttaatttctgttgtattcaaaag

SEQ ID NO: 83140 - DNA, 40 bp, Homo sapiens
ttttgaatacaacagaaattaaaactttatgggatagaaa

SEQ ID NO: 83141 - DNA, 40 bp, Homo sapiens
tttctatcccataaagttttaatttctgttgtattcaaaa

SEQ ID NO: 83142 - DNA, 40 bp, Homo sapiens
tttgaatacaacagaaattaaaactttatgggatagaaag

SEQ ID NO: 83143 - DNA, 40 bp, Homo sapiens
ctttctatcccataaagttttaatttctgttgtattcaaa

SEQ ID NO: 83144 - DNA, 40 bp, Homo sapiens
ttgaatacaacagaaattaaaactttatgggatagaaaga

SEQ ID NO: 83145 - DNA, 40 bp, Homo sapiens
tctttctatcccataaagttttaatttctgttgtattcaa

SEQ ID NO: 83146 - DNA, 40 bp, Homo sapiens
tgaatacaacagaaattaaaactttatgggatagaaagaa

SEQ ID NO: 83147 - DNA, 40 bp, Homo sapiens
ttctttctatcccataaagttttaatttctgttgtattca

SEQ ID NO: 83148 - DNA, 40 bp, Homo sapiens
gaatacaacagaaattaaaactttatgggatagaaagaat

SEQ ID NO: 83149 - DNA, 40 bp, Homo sapiens
attctttctatcccataaagttttaatttctgttgtattc

SEQ ID NO: 83150 - DNA, 40 bp, Homo sapiens
aatacaacagaaattaaaactttatgggatagaaagaatc

SEQ ID NO: 83151 - DNA, 40 bp, Homo sapiens
gattctttctatcccataaagttttaatttctgttgtatt

SEQ ID NO: 83152 - DNA, 40 bp, Homo sapiens
atacaacagaaattaaaactttatgggatagaaagaatct

SEQ ID NO: 83153 - DNA, 40 bp, Homo sapiens
agattctttctatcccataaagttttaatttctgttgtat

SEQ ID NO: 83154 - DNA, 40 bp, Homo sapiens
tacaacagaaattaaaactttatgggatagaaagaatctc

SEQ ID NO: 83155 - DNA, 40 bp, Homo sapiens
gagattctttctatcccataaagttttaatttctgttgta

SEQ ID NO: 83156 - DNA, 40 bp, Homo sapiens
acaacagaaattaaaactttatgggatagaaagaatctcc

SEQ ID NO: 83157 - DNA, 40 bp, Homo sapiens
ggagattctttctatcccataaagttttaatttctgttgt

SEQ ID NO: 83158 - DNA, 40 bp, Homo sapiens
caacagaaattaaaactttatgggatagaaagaatctcct

SEQ ID NO: 83159 - DNA, 40 bp, Homo sapiens
aggagattctttctatcccataaagttttaatttctgttg

SEQ ID NO: 83160 - DNA, 40 bp, Homo sapiens
aacagaaattaaaactttatgggatagaaagaatctcctc

SEQ ID NO: 83161 - DNA, 40 bp, Homo sapiens
gaggagattctttctatcccataaagttttaatttctgtt

SEQ ID NO: 83162 - DNA, 40 bp, Homo sapiens
acagaaattaaaactttatgggatagaaagaatctcctcc

SEQ ID NO: 83163 - DNA, 40 bp, Homo sapiens
ggaggagattctttctatcccataaagttttaatttctgt

SEQ ID NO: 83164 - DNA, 40 bp, Homo sapiens
cagaaattaaaactttatgggatagaaagaatctcctcca

SEQ ID NO: 83165 - DNA, 40 bp, Homo sapiens
tggaggagattctttctatcccataaagttttaatttctg

SEQ ID NO: 83166 - DNA, 40 bp, Homo sapiens
agaaattaaaactttatgggatagaaagaatctcctccaa

SEQ ID NO: 83167 - DNA, 40 bp, Homo sapiens
ttggaggagattctttctatcccataaagttttaatttct

SEQ ID NO: 83168 - DNA, 40 bp, Homo sapiens
gaaattaaaactttatgggatagaaagaatctcctccaaa

SEQ ID NO: 83169 - DNA, 40 bp, Homo sapiens
tttggaggagattctttctatcccataaagttttaatttc

SEQ ID NO: 83170 - DNA, 40 bp, Homo sapiens
aaattaaaactttatgggatagaaagaatctcctccaaat

SEQ ID NO: 83171 - DNA, 40 bp, Homo sapiens
atttggaggagattctttctatcccataaagttttaattt

SEQ ID NO: 83172 - DNA, 40 bp, Homo sapiens
aattaaaactttatgggatagaaagaatctcctccaaatt

SEQ ID NO: 83173 - DNA, 40 bp, Homo sapiens
aatttggaggagattctttctatcccataaagttttaatt

SEQ ID NO: 83174 - DNA, 40 bp, Homo sapiens
attaaaactttatgggatagaaagaatctcctccaaattg

SEQ ID NO: 83175 - DNA, 40 bp, Homo sapiens
caatttggaggagattctttctatcccataaagttttaat

SEQ ID NO: 83176 - DNA, 40 bp, Homo sapiens
ttaaaactttatgggatagaaagaatctcctccaaattgg

SEQ ID NO: 83177 - DNA, 40 bp, Homo sapiens
ccaatttggaggagattctttctatcccataaagttttaa

SEQ ID NO: 83178 - DNA, 40 bp, Homo sapiens
taaaactttatgggatagaaagaatctcctccaaattggt

SEQ ID NO: 83179 - DNA, 40 bp, Homo sapiens
accaatttggaggagattctttctatcccataaagtttta

SEQ ID NO: 83180 - DNA, 40 bp, Homo sapiens
aaaactttatgggatagaaagaatctcctccaaattggta

SEQ ID NO: 83181 - DNA, 40 bp, Homo sapiens
taccaatttggaggagattctttctatcccataaagtttt

SEQ ID NO: 83182 - DNA, 40 bp, Homo sapiens
aaactttatgggatagaaagaatctcctccaaattggtaa

SEQ ID NO: 83183 - DNA, 40 bp, Homo sapiens
ttaccaatttggaggagattctttctatcccataaagttt

SEQ ID NO: 83184 - DNA, 40 bp, Homo sapiens
aactttatgggatagaaagaatctcctccaaattggtaaa

SEQ ID NO: 83185 - DNA, 40 bp, Homo sapiens
tttaccaatttggaggagattctttctatcccataaagtt

SEQ ID NO: 83186 - DNA, 40 bp, Homo sapiens
actttatgggatagaaagaatctcctccaaattggtaaac

SEQ ID NO: 83187 - DNA, 40 bp, Homo sapiens
gtttaccaatttggaggagattctttctatcccataaagt

SEQ ID NO: 83188 - DNA, 40 bp, Homo sapiens
ctttatgggatagaaagaatctcctccaaattggtaaact

SEQ ID NO: 83189 - DNA, 40 bp, Homo sapiens
agtttaccaatttggaggagattctttctatcccataaag

SEQ ID NO: 83190 - DNA, 40 bp, Homo sapiens
tttatgggatagaaagaatctcctccaaattggtaaacta

SEQ ID NO: 83191 - DNA, 40 bp, Homo sapiens
tagtttaccaatttggaggagattctttctatcccataaa

SEQ ID NO: 83192 - DNA, 40 bp, Homo sapiens
ttatgggatagaaagaatctcctccaaattggtaaactat

SEQ ID NO: 83193 - DNA, 40 bp, Homo sapiens
atagtttaccaatttggaggagattctttctatcccataa

SEQ ID NO: 83194 - DNA, 40 bp, Homo sapiens
tatgggatagaaagaatctcctccaaattggtaaactata

SEQ ID NO: 83195 - DNA, 40 bp, Homo sapiens
tatagtttaccaatttggaggagattctttctatcccata

SEQ ID NO: 83196 - DNA, 40 bp, Homo sapiens
atgggatagaaagaatctcctccaaattggtaaactataa

SEQ ID NO: 83197 - DNA, 40 bp, Homo sapiens
ttatagtttaccaatttggaggagattctttctatcccat

SEQ ID NO: 83198 - DNA, 40 bp, Homo sapiens
tgggatagaaagaatctcctccaaattggtaaactataag

SEQ ID NO: 83199 - DNA, 40 bp, Homo sapiens
cttatagtttaccaatttggaggagattctttctatccca

SEQ ID NO: 83200 - DNA, 40 bp, Homo sapiens
gggatagaaagaatctcctccaaattggtaaactataaga

SEQ ID NO: 83201 - DNA, 40 bp, Homo sapiens
tcttatagtttaccaatttggaggagattctttctatccc

SEQ ID NO: 83202 - DNA, 40 bp, Homo sapiens
ggatagaaagaatctcctccaaattggtaaactataagac

SEQ ID NO: 83203 - DNA, 40 bp, Homo sapiens
gtcttatagtttaccaatttggaggagattctttctatcc

SEQ ID NO: 83204 - DNA, 40 bp, Homo sapiens
gatagaaagaatctcctccaaattggtaaactataagacc

SEQ ID NO: 83205 - DNA, 40 bp, Homo sapiens
ggtcttatagtttaccaatttggaggagattctttctatc

SEQ ID NO: 83206 - DNA, 40 bp, Homo sapiens
atagaaagaatctcctccaaattggtaaactataagacct

SEQ ID NO: 83207 - DNA, 40 bp, Homo sapiens
aggtcttatagtttaccaatttggaggagattctttctat

SEQ ID NO: 83208 - DNA, 40 bp, Homo sapiens
tagaaagaatctcctccaaattggtaaactataagacctt

SEQ ID NO: 83209 - DNA, 40 bp, Homo sapiens
aaggtcttatagtttaccaatttggaggagattctttcta

SEQ ID NO: 83210 - DNA, 40 bp, Homo sapiens
agaaagaatctcctccaaattggtaaactataagaccttt

SEQ ID NO: 83211 - DNA, 40 bp, Homo sapiens
aaaggtcttatagtttaccaatttggaggagattctttct

SEQ ID NO: 83212 - DNA, 40 bp, Homo sapiens
gaaagaatctcctccaaattggtaaactataagacctttc

SEQ ID NO: 83213 - DNA, 40 bp, Homo sapiens
gaaaggtcttatagtttaccaatttggaggagattctttc

SEQ ID NO: 83214 - DNA, 40 bp, Homo sapiens
aaagaatctcctccaaattggtaaactataagacctttca

SEQ ID NO: 83215 - DNA, 40 bp, Homo sapiens
tgaaaggtcttatagtttaccaatttggaggagattcttt

SEQ ID NO: 83216 - DNA, 40 bp, Homo sapiens
aagaatctcctccaaattggtaaactataagacctttcaa

SEQ ID NO: 83217 - DNA, 40 bp, Homo sapiens
ttgaaaggtcttatagtttaccaatttggaggagattctt

SEQ ID NO: 83218 - DNA, 40 bp, Homo sapiens
agaatctcctccaaattggtaaactataagacctttcaaa

SEQ ID NO: 83219 - DNA, 40 bp, Homo sapiens
tttgaaaggtcttatagtttaccaatttggaggagattct

SEQ ID NO: 83220 - DNA, 40 bp, Homo sapiens
gaatctcctccaaattggtaaactataagacctttcaaat

SEQ ID NO: 83221 - DNA, 40 bp, Homo sapiens
atttgaaaggtcttatagtttaccaatttggaggagattc

SEQ ID NO: 83222 - DNA, 40 bp, Homo sapiens
aatctcctccaaattggtaaactataagacctttcaaatg

SEQ ID NO: 83223 - DNA, 40 bp, Homo sapiens
catttgaaaggtcttatagtttaccaatttggaggagatt

SEQ ID NO: 83224 - DNA, 40 bp, Homo sapiens
atctcctccaaattggtaaactataagacctttcaaatga

SEQ ID NO: 83225 - DNA, 40 bp, Homo sapiens
tcatttgaaaggtcttatagtttaccaatttggaggagat

SEQ ID NO: 83226 - DNA, 40 bp, Homo sapiens
tctcctccaaattggtaaactataagacctttcaaatgat

SEQ ID NO: 83227 - DNA, 40 bp, Homo sapiens
atcatttgaaaggtcttatagtttaccaatttggaggaga

SEQ ID NO: 83228 - DNA, 40 bp, Homo sapiens
ctcctccaaattggtaaactataagacctttcaaatgatt

SEQ ID NO: 83229 - DNA, 40 bp, Homo sapiens
aatcatttgaaaggtcttatagtttaccaatttggaggag

SEQ ID NO: 83230 - DNA, 40 bp, Homo sapiens
tcctccaaattggtaaactataagacctttcaaatgattt

SEQ ID NO: 83231 - DNA, 40 bp, Homo sapiens
aaatcatttgaaaggtcttatagtttaccaatttggagga

SEQ ID NO: 83232 - DNA, 40 bp, Homo sapiens
cctccaaattggtaaactataagacctttcaaatgattta

SEQ ID NO: 83233 - DNA, 40 bp, Homo sapiens
taaatcatttgaaaggtcttatagtttaccaatttggagg

SEQ ID NO: 83234 - DNA, 40 bp, Homo sapiens
ctccaaattggtaaactataagacctttcaaatgatttag

SEQ ID NO: 83235 - DNA, 40 bp, Homo sapiens
ctaaatcatttgaaaggtcttatagtttaccaatttggag

SEQ ID NO: 83236 - DNA, 40 bp, Homo sapiens
tccaaattggtaaactataagacctttcaaatgatttagc

SEQ ID NO: 83237 - DNA, 40 bp, Homo sapiens
gctaaatcatttgaaaggtcttatagtttaccaatttgga

SEQ ID NO: 83238 - DNA, 40 bp, Homo sapiens
ccaaattggtaaactataagacctttcaaatgatttagct

SEQ ID NO: 83239 - DNA, 40 bp, Homo sapiens
agctaaatcatttgaaaggtcttatagtttaccaatttgg

SEQ ID NO: 83240 - DNA, 40 bp, Homo sapiens
caaattggtaaactataagacctttcaaatgatttagcta

SEQ ID NO: 83241 - DNA, 40 bp, Homo sapiens
tagctaaatcatttgaaaggtcttatagtttaccaatttg

SEQ ID NO: 83242 - DNA, 40 bp, Homo sapiens
aaattggtaaactataagacctttcaaatgatttagctaa

SEQ ID NO: 83243 - DNA, 40 bp, Homo sapiens
ttagctaaatcatttgaaaggtcttatagtttaccaattt

SEQ ID NO: 83244 - DNA, 40 bp, Homo sapiens
aattggtaaactataagacctttcaaatgatttagctaat

SEQ ID NO: 83245 - DNA, 40 bp, Homo sapiens
attagctaaatcatttgaaaggtcttatagtttaccaatt

SEQ ID NO: 83246 - DNA, 40 bp, Homo sapiens
attggtaaactataagacctttcaaatgatttagctaatt

SEQ ID NO: 83247 - DNA, 40 bp, Homo sapiens
aattagctaaatcatttgaaaggtcttatagtttaccaat

SEQ ID NO: 83248 - DNA, 40 bp, Homo sapiens
ttggtaaactataagacctttcaaatgatttagctaattt

SEQ ID NO: 83249 - DNA, 40 bp, Homo sapiens
aaattagctaaatcatttgaaaggtcttatagtttaccaa

SEQ ID NO: 83250 - DNA, 40 bp, Homo sapiens
tggtaaactataagacctttcaaatgatttagctaatttc

SEQ ID NO: 83251 - DNA, 40 bp, Homo sapiens
gaaattagctaaatcatttgaaaggtcttatagtttacca

SEQ ID NO: 83252 - DNA, 40 bp, Homo sapiens
ggtaaactataagacctttcaaatgatttagctaatttct

SEQ ID NO: 83253 - DNA, 40 bp, Homo sapiens
agaaattagctaaatcatttgaaaggtcttatagtttacc

SEQ ID NO: 83254 - DNA, 40 bp, Homo sapiens
gtaaactataagacctttcaaatgatttagctaatttctc

SEQ ID NO: 83255 - DNA, 40 bp, Homo sapiens
gagaaattagctaaatcatttgaaaggtcttatagtttac

SEQ ID NO: 83256 - DNA, 40 bp, Homo sapiens
taaactataagacctttcaaatgatttagctaatttctcc

SEQ ID NO: 83257 - DNA, 40 bp, Homo sapiens
ggagaaattagctaaatcatttgaaaggtcttatagttta

SEQ ID NO: 83258 - DNA, 40 bp, Homo sapiens
aaactataagacctttcaaatgatttagctaatttctcca

SEQ ID NO: 83259 - DNA, 40 bp, Homo sapiens
tggagaaattagctaaatcatttgaaaggtcttatagttt

SEQ ID NO: 83260 - DNA, 40 bp, Homo sapiens
aactataagacctttcaaatgatttagctaatttctccac

SEQ ID NO: 83261 - DNA, 40 bp, Homo sapiens
gtggagaaattagctaaatcatttgaaaggtcttatagtt

SEQ ID NO: 83262 - DNA, 40 bp, Homo sapiens
actataagacctttcaaatgatttagctaatttctccaca

SEQ ID NO: 83263 - DNA, 40 bp, Homo sapiens
tgtggagaaattagctaaatcatttgaaaggtcttatagt

SEQ ID NO: 83264 - DNA, 40 bp, Homo sapiens
ctataagacctttcaaatgatttagctaatttctccacaa

SEQ ID NO: 83265 - DNA, 40 bp, Homo sapiens
ttgtggagaaattagctaaatcatttgaaaggtcttatag

SEQ ID NO: 83266 - DNA, 40 bp, Homo sapiens
tataagacctttcaaatgatttagctaatttctccacaaa

SEQ ID NO: 83267 - DNA, 40 bp, Homo sapiens
tttgtggagaaattagctaaatcatttgaaaggtcttata

SEQ ID NO: 83268 - DNA, 40 bp, Homo sapiens
ataagacctttcaaatgatttagctaatttctccacaaat

SEQ ID NO: 83269 - DNA, 40 bp, Homo sapiens
atttgtggagaaattagctaaatcatttgaaaggtcttat

SEQ ID NO: 83270 - DNA, 40 bp, Homo sapiens
taagacctttcaaatgatttagctaatttctccacaaatc

SEQ ID NO: 83271 - DNA, 40 bp, Homo sapiens
gatttgtggagaaattagctaaatcatttgaaaggtctta

SEQ ID NO: 83272 - DNA, 40 bp, Homo sapiens
aagacctttcaaatgatttagctaatttctccacaaatct

SEQ ID NO: 83273 - DNA, 40 bp, Homo sapiens
agatttgtggagaaattagctaaatcatttgaaaggtctt

SEQ ID NO: 83274 - DNA, 40 bp, Homo sapiens
agacctttcaaatgatttagctaatttctccacaaatctg

SEQ ID NO: 83275 - DNA, 40 bp, Homo sapiens
cagatttgtggagaaattagctaaatcatttgaaaggtct

SEQ ID NO: 83276 - DNA, 40 bp, Homo sapiens
gacctttcaaatgatttagctaatttctccacaaatctga

SEQ ID NO: 83277 - DNA, 40 bp, Homo sapiens
tcagatttgtggagaaattagctaaatcatttgaaaggtc

SEQ ID NO: 83278 - DNA, 40 bp, Homo sapiens
acctttcaaatgatttagctaatttctccacaaatctgag

SEQ ID NO: 83279 - DNA, 40 bp, Homo sapiens
ctcagatttgtggagaaattagctaaatcatttgaaaggt

SEQ ID NO: 83280 - DNA, 40 bp, Homo sapiens
cctttcaaatgatttagctaatttctccacaaatctgagg

SEQ ID NO: 83281 - DNA, 40 bp, Homo sapiens
cctcagatttgtggagaaattagctaaatcatttgaaagg

SEQ ID NO: 83282 - DNA, 40 bp, Homo sapiens
ctttcaaatgatttagctaatttctccacaaatctgaggt

SEQ ID NO: 83283 - DNA, 40 bp, Homo sapiens
acctcagatttgtggagaaattagctaaatcatttgaaag

SEQ ID NO: 83284 - DNA, 40 bp, Homo sapiens
tttcaaatgatttagctaatttctccacaaatctgaggta

SEQ ID NO: 83285 - DNA, 40 bp, Homo sapiens
tacctcagatttgtggagaaattagctaaatcatttgaaa

SEQ ID NO: 83286 - DNA, 40 bp, Homo sapiens
ttcaaatgatttagctaatttctccacaaatctgaggtat

SEQ ID NO: 83287 - DNA, 40 bp, Homo sapiens
atacctcagatttgtggagaaattagctaaatcatttgaa

SEQ ID NO: 83288 - DNA, 40 bp, Homo sapiens
tcaaatgatttagctaatttctccacaaatctgaggtatt

SEQ ID NO: 83289 - DNA, 40 bp, Homo sapiens
aatacctcagatttgtggagaaattagctaaatcatttga

SEQ ID NO: 83290 - DNA, 40 bp, Homo sapiens
caaatgatttagctaatttctccacaaatctgaggtatta

SEQ ID NO: 83291 - DNA, 40 bp, Homo sapiens
taatacctcagatttgtggagaaattagctaaatcatttg

SEQ ID NO: 83292 - DNA, 40 bp, Homo sapiens
aaatgatttagctaatttctccacaaatctgaggtattag

SEQ ID NO: 83293 - DNA, 40 bp, Homo sapiens
ctaatacctcagatttgtggagaaattagctaaatcattt

SEQ ID NO: 83294 - DNA, 40 bp, Homo sapiens
aatgatttagctaatttctccacaaatctgaggtattagt

SEQ ID NO: 83295 - DNA, 40 bp, Homo sapiens
actaatacctcagatttgtggagaaattagctaaatcatt

SEQ ID NO: 83296 - DNA, 40 bp, Homo sapiens
atgatttagctaatttctccacaaatctgaggtattagtg

SEQ ID NO: 83297 - DNA, 40 bp, Homo sapiens
cactaatacctcagatttgtggagaaattagctaaatcat

SEQ ID NO: 83298 - DNA, 40 bp, Homo sapiens
tgatttagctaatttctccacaaatctgaggtattagtgt

SEQ ID NO: 83299 - DNA, 40 bp, Homo sapiens
acactaatacctcagatttgtggagaaattagctaaatca

SEQ ID NO: 83300 - DNA, 40 bp, Homo sapiens
gatttagctaatttctccacaaatctgaggtattagtgtt

SEQ ID NO: 83301 - DNA, 40 bp, Homo sapiens
aacactaatacctcagatttgtggagaaattagctaaatc

SEQ ID NO: 83302 - DNA, 40 bp, Homo sapiens
atttagctaatttctccacaaatctgaggtattagtgttt

SEQ ID NO: 83303 - DNA, 40 bp, Homo sapiens
aaacactaatacctcagatttgtggagaaattagctaaat

SEQ ID NO: 83304 - DNA, 40 bp, Homo sapiens
tttagctaatttctccacaaatctgaggtattagtgtttt

SEQ ID NO: 83305 - DNA, 40 bp, Homo sapiens
aaaacactaatacctcagatttgtggagaaattagctaaa

SEQ ID NO: 83306 - DNA, 40 bp, Homo sapiens
ttagctaatttctccacaaatctgaggtattagtgttttt

SEQ ID NO: 83307 - DNA, 40 bp, Homo sapiens
aaaaacactaatacctcagatttgtggagaaattagctaa

SEQ ID NO: 83308 - DNA, 40 bp, Homo sapiens
tagctaatttctccacaaatctgaggtattagtgtttttt

SEQ ID NO: 83309 - DNA, 40 bp, Homo sapiens
aaaaaacactaatacctcagatttgtggagaaattagcta

SEQ ID NO: 83310 - DNA, 40 bp, Homo sapiens
agctaatttctccacaaatctgaggtattagtgttttttt

SEQ ID NO: 83311 - DNA, 40 bp, Homo sapiens
aaaaaaacactaatacctcagatttgtggagaaattagct

SEQ ID NO: 83312 - DNA, 40 bp, Homo sapiens
gctaatttctccacaaatctgaggtattagtgtttttttt

SEQ ID NO: 83313 - DNA, 40 bp, Homo sapiens
aaaaaaaacactaatacctcagatttgtggagaaattagc

SEQ ID NO: 83314 - DNA, 40 bp, Homo sapiens
ctaatttctccacaaatctgaggtattagtgtttttttta

SEQ ID NO: 83315 - DNA, 40 bp, Homo sapiens
taaaaaaaacactaatacctcagatttgtggagaaattag

SEQ ID NO: 83316 - DNA, 40 bp, Homo sapiens
taatttctccacaaatctgaggtattagtgttttttttaa

SEQ ID NO: 83317 - DNA, 40 bp, Homo sapiens
ttaaaaaaaacactaatacctcagatttgtggagaaatta

SEQ ID NO: 83318 - DNA, 40 bp, Homo sapiens
aatttctccacaaatctgaggtattagtgttttttttaaa

SEQ ID NO: 83319 - DNA, 40 bp, Homo sapiens
tttaaaaaaaacactaatacctcagatttgtggagaaatt

SEQ ID NO: 83320 - DNA, 40 bp, Homo sapiens
atttctccacaaatctgaggtattagtgttttttttaaag

SEQ ID NO: 83321 - DNA, 40 bp, Homo sapiens
ctttaaaaaaaacactaatacctcagatttgtggagaaat

SEQ ID NO: 83322 - DNA, 40 bp, Homo sapiens
tttctccacaaatctgaggtattagtgttttttttaaagt

SEQ ID NO: 83323 - DNA, 40 bp, Homo sapiens
actttaaaaaaaacactaatacctcagatttgtggagaaa

SEQ ID NO: 83324 - DNA, 40 bp, Homo sapiens
ttctccacaaatctgaggtattagtgttttttttaaagtg

SEQ ID NO: 83325 - DNA, 40 bp, Homo sapiens
cactttaaaaaaaacactaatacctcagatttgtggagaa

SEQ ID NO: 83326 - DNA, 40 bp, Homo sapiens
tctccacaaatctgaggtattagtgttttttttaaagtgg

SEQ ID NO: 83327 - DNA, 40 bp, Homo sapiens
ccactttaaaaaaaacactaatacctcagatttgtggaga

SEQ ID NO: 83328 - DNA, 40 bp, Homo sapiens
ctccacaaatctgaggtattagtgttttttttaaagtggt

SEQ ID NO: 83329 - DNA, 40 bp, Homo sapiens
accactttaaaaaaaacactaatacctcagatttgtggag

SEQ ID NO: 83330 - DNA, 40 bp, Homo sapiens
tccacaaatctgaggtattagtgttttttttaaagtggta

SEQ ID NO: 83331 - DNA, 40 bp, Homo sapiens
taccactttaaaaaaaacactaatacctcagatttgtgga

SEQ ID NO: 83332 - DNA, 40 bp, Homo sapiens
ccacaaatctgaggtattagtgttttttttaaagtggtat

SEQ ID NO: 83333 - DNA, 40 bp, Homo sapiens
ataccactttaaaaaaaacactaatacctcagatttgtgg

SEQ ID NO: 83334 - DNA, 40 bp, Homo sapiens
cacaaatctgaggtattagtgttttttttaaagtggtatt

SEQ ID NO: 83335 - DNA, 40 bp, Homo sapiens
aataccactttaaaaaaaacactaatacctcagatttgtg

SEQ ID NO: 83336 - DNA, 40 bp, Homo sapiens
acaaatctgaggtattagtgttttttttaaagtggtattc

SEQ ID NO: 83337 - DNA, 40 bp, Homo sapiens
gaataccactttaaaaaaaacactaatacctcagatttgt

SEQ ID NO: 83338 - DNA, 40 bp, Homo sapiens
caaatctgaggtattagtgttttttttaaagtggtattct

SEQ ID NO: 83339 - DNA, 40 bp, Homo sapiens
agaataccactttaaaaaaaacactaatacctcagatttg

SEQ ID NO: 83340 - DNA, 40 bp, Homo sapiens
aaatctgaggtattagtgttttttttaaagtggtattctc

SEQ ID NO: 83341 - DNA, 40 bp, Homo sapiens
gagaataccactttaaaaaaaacactaatacctcagattt

SEQ ID NO: 83342 - DNA, 40 bp, Homo sapiens
aatctgaggtattagtgttttttttaaagtggtattctcc

SEQ ID NO: 83343 - DNA, 40 bp, Homo sapiens
ggagaataccactttaaaaaaaacactaatacctcagatt

SEQ ID NO: 83344 - DNA, 40 bp, Homo sapiens
atctgaggtattagtgttttttttaaagtggtattctcct

SEQ ID NO: 83345 - DNA, 40 bp, Homo sapiens
aggagaataccactttaaaaaaaacactaatacctcagat

SEQ ID NO: 83346 - DNA, 40 bp, Homo sapiens
tctgaggtattagtgttttttttaaagtggtattctcctg

SEQ ID NO: 83347 - DNA, 40 bp, Homo sapiens
caggagaataccactttaaaaaaaacactaatacctcaga

SEQ ID NO: 83348 - DNA, 40 bp, Homo sapiens
ctgaggtattagtgttttttttaaagtggtattctcctgt

SEQ ID NO: 83349 - DNA, 40 bp, Homo sapiens
acaggagaataccactttaaaaaaaacactaatacctcag

SEQ ID NO: 83350 - DNA, 40 bp, Homo sapiens
tgaggtattagtgttttttttaaagtggtattctcctgtg

SEQ ID NO: 83351 - DNA, 40 bp, Homo sapiens
cacaggagaataccactttaaaaaaaacactaatacctca

SEQ ID NO: 83352 - DNA, 40 bp, Homo sapiens
gaggtattagtgttttttttaaagtggtattctcctgtgt

SEQ ID NO: 83353 - DNA, 40 bp, Homo sapiens
acacaggagaataccactttaaaaaaaacactaatacctc

SEQ ID NO: 83354 - DNA, 40 bp, Homo sapiens
aggtattagtgttttttttaaagtggtattctcctgtgtt

SEQ ID NO: 83355 - DNA, 40 bp, Homo sapiens
aacacaggagaataccactttaaaaaaaacactaatacct

SEQ ID NO: 83356 - DNA, 40 bp, Homo sapiens
ggtattagtgttttttttaaagtggtattctcctgtgttg

SEQ ID NO: 83357 - DNA, 40 bp, Homo sapiens
caacacaggagaataccactttaaaaaaaacactaatacc

SEQ ID NO: 83358 - DNA, 40 bp, Homo sapiens
gtattagtgttttttttaaagtggtattctcctgtgttgg

SEQ ID NO: 83359 - DNA, 40 bp, Homo sapiens
ccaacacaggagaataccactttaaaaaaaacactaatac

SEQ ID NO: 83360 - DNA, 40 bp, Homo sapiens
tattagtgttttttttaaagtggtattctcctgtgttggg

SEQ ID NO: 83361 - DNA, 40 bp, Homo sapiens
cccaacacaggagaataccactttaaaaaaaacactaata

SEQ ID NO: 83362 - DNA, 40 bp, Homo sapiens
attagtgttttttttaaagtggtattctcctgtgttgggg

SEQ ID NO: 83363 - DNA, 40 bp, Homo sapiens
ccccaacacaggagaataccactttaaaaaaaacactaat

SEQ ID NO: 83364 - DNA, 40 bp, Homo sapiens
ttagtgttttttttaaagtggtattctcctgtgttggggt

SEQ ID NO: 83365 - DNA, 40 bp, Homo sapiens
accccaacacaggagaataccactttaaaaaaaacactaa

SEQ ID NO: 83366 - DNA, 40 bp, Homo sapiens
tagtgttttttttaaagtggtattctcctgtgttggggtc

SEQ ID NO: 83367 - DNA, 40 bp, Homo sapiens
gaccccaacacaggagaataccactttaaaaaaaacacta

SEQ ID NO: 83368 - DNA, 40 bp, Homo sapiens
agtgttttttttaaagtggtattctcctgtgttggggtca

SEQ ID NO: 83369 - DNA, 40 bp, Homo sapiens
tgaccccaacacaggagaataccactttaaaaaaaacact

SEQ ID NO: 83370 - DNA, 40 bp, Homo sapiens
gtgttttttttaaagtggtattctcctgtgttggggtcac

SEQ ID NO: 83371 - DNA, 40 bp, Homo sapiens
gtgaccccaacacaggagaataccactttaaaaaaaacac

SEQ ID NO: 83372 - DNA, 40 bp, Homo sapiens
tgttttttttaaagtggtattctcctgtgttggggtcact

SEQ ID NO: 83373 - DNA, 40 bp, Homo sapiens
agtgaccccaacacaggagaataccactttaaaaaaaaca

SEQ ID NO: 83374 - DNA, 40 bp, Homo sapiens
gttttttttaaagtggtattctcctgtgttggggtcactt

SEQ ID NO: 83375 - DNA, 40 bp, Homo sapiens
aagtgaccccaacacaggagaataccactttaaaaaaaac

SEQ ID NO: 83376 - DNA, 40 bp, Homo sapiens
ttttttttaaagtggtattctcctgtgttggggtcacttt

SEQ ID NO: 83377 - DNA, 40 bp, Homo sapiens
aaagtgaccccaacacaggagaataccactttaaaaaaaa

SEQ ID NO: 83378 - DNA, 40 bp, Homo sapiens
tttttttaaagtggtattctcctgtgttggggtcacttta

SEQ ID NO: 83379 - DNA, 40 bp, Homo sapiens
taaagtgaccccaacacaggagaataccactttaaaaaaa

SEQ ID NO: 83380 - DNA, 40 bp, Homo sapiens
ttttttaaagtggtattctcctgtgttggggtcactttaa

SEQ ID NO: 83381 - DNA, 40 bp, Homo sapiens
ttaaagtgaccccaacacaggagaataccactttaaaaaa

SEQ ID NO: 83382 - DNA, 40 bp, Homo sapiens
tttttaaagtggtattctcctgtgttggggtcactttaaa

SEQ ID NO: 83383 - DNA, 40 bp, Homo sapiens
tttaaagtgaccccaacacaggagaataccactttaaaaa

SEQ ID NO: 83384 - DNA, 40 bp, Homo sapiens
ttttaaagtggtattctcctgtgttggggtcactttaaac

SEQ ID NO: 83385 - DNA, 40 bp, Homo sapiens
gtttaaagtgaccccaacacaggagaataccactttaaaa

SEQ ID NO: 83386 - DNA, 40 bp, Homo sapiens
tttaaagtggtattctcctgtgttggggtcactttaaacc

SEQ ID NO: 83387 - DNA, 40 bp, Homo sapiens
ggtttaaagtgaccccaacacaggagaataccactttaaa

SEQ ID NO: 83388 - DNA, 40 bp, Homo sapiens
ttaaagtggtattctcctgtgttggggtcactttaaacct

SEQ ID NO: 83389 - DNA, 40 bp, Homo sapiens
aggtttaaagtgaccccaacacaggagaataccactttaa

SEQ ID NO: 83390 - DNA, 40 bp, Homo sapiens
taaagtggtattctcctgtgttggggtcactttaaacctt

SEQ ID NO: 83391 - DNA, 40 bp, Homo sapiens
aaggtttaaagtgaccccaacacaggagaataccacttta

SEQ ID NO: 83392 - DNA, 40 bp, Homo sapiens
aaagtggtattctcctgtgttggggtcactttaaaccttt

SEQ ID NO: 83393 - DNA, 40 bp, Homo sapiens
aaaggtttaaagtgaccccaacacaggagaataccacttt

SEQ ID NO: 83394 - DNA, 40 bp, Homo sapiens
aagtggtattctcctgtgttggggtcactttaaacctttt

SEQ ID NO: 83395 - DNA, 40 bp, Homo sapiens
aaaaggtttaaagtgaccccaacacaggagaataccactt

SEQ ID NO: 83396 - DNA, 40 bp, Homo sapiens
agtggtattctcctgtgttggggtcactttaaaccttttt

SEQ ID NO: 83397 - DNA, 40 bp, Homo sapiens
aaaaaggtttaaagtgaccccaacacaggagaataccact

SEQ ID NO: 83398 - DNA, 40 bp, Homo sapiens
gtggtattctcctgtgttggggtcactttaaacctttttc

SEQ ID NO: 83399 - DNA, 40 bp, Homo sapiens
gaaaaaggtttaaagtgaccccaacacaggagaataccac

SEQ ID NO: 83400 - DNA, 40 bp, Homo sapiens
tggtattctcctgtgttggggtcactttaaacctttttct

SEQ ID NO: 83401 - DNA, 40 bp, Homo sapiens
agaaaaaggtttaaagtgaccccaacacaggagaatacca

SEQ ID NO: 83402 - DNA, 40 bp, Homo sapiens
ggtattctcctgtgttggggtcactttaaacctttttctt

SEQ ID NO: 83403 - DNA, 40 bp, Homo sapiens
aagaaaaaggtttaaagtgaccccaacacaggagaatacc

SEQ ID NO: 83404 - DNA, 40 bp, Homo sapiens
gtattctcctgtgttggggtcactttaaacctttttctta

SEQ ID NO: 83405 - DNA, 40 bp, Homo sapiens
taagaaaaaggtttaaagtgaccccaacacaggagaatac

SEQ ID NO: 83406 - DNA, 40 bp, Homo sapiens
tattctcctgtgttggggtcactttaaacctttttcttaa

SEQ ID NO: 83407 - DNA, 40 bp, Homo sapiens
ttaagaaaaaggtttaaagtgaccccaacacaggagaata

SEQ ID NO: 83408 - DNA, 40 bp, Homo sapiens
attctcctgtgttggggtcactttaaacctttttcttaat

SEQ ID NO: 83409 - DNA, 40 bp, Homo sapiens
attaagaaaaaggtttaaagtgaccccaacacaggagaat

SEQ ID NO: 83410 - DNA, 40 bp, Homo sapiens
ttctcctgtgttggggtcactttaaacctttttcttaatg

SEQ ID NO: 83411 - DNA, 40 bp, Homo sapiens
cattaagaaaaaggtttaaagtgaccccaacacaggagaa

SEQ ID NO: 83412 - DNA, 40 bp, Homo sapiens
tctcctgtgttggggtcactttaaacctttttcttaatga

SEQ ID NO: 83413 - DNA, 40 bp, Homo sapiens
tcattaagaaaaaggtttaaagtgaccccaacacaggaga

SEQ ID NO: 83414 - DNA, 40 bp, Homo sapiens
ctcctgtgttggggtcactttaaacctttttcttaatgat

SEQ ID NO: 83415 - DNA, 40 bp, Homo sapiens
atcattaagaaaaaggtttaaagtgaccccaacacaggag

SEQ ID NO: 83416 - DNA, 40 bp, Homo sapiens
tcctgtgttggggtcactttaaacctttttcttaatgata

SEQ ID NO: 83417 - DNA, 40 bp, Homo sapiens
tatcattaagaaaaaggtttaaagtgaccccaacacagga

SEQ ID NO: 83418 - DNA, 40 bp, Homo sapiens
cctgtgttggggtcactttaaacctttttcttaatgataa

SEQ ID NO: 83419 - DNA, 40 bp, Homo sapiens
ttatcattaagaaaaaggtttaaagtgaccccaacacagg

SEQ ID NO: 83420 - DNA, 40 bp, Homo sapiens
ctgtgttggggtcactttaaacctttttcttaatgataaa

SEQ ID NO: 83421 - DNA, 40 bp, Homo sapiens
tttatcattaagaaaaaggtttaaagtgaccccaacacag

SEQ ID NO: 83422 - DNA, 40 bp, Homo sapiens
tgtgttggggtcactttaaacctttttcttaatgataaat

SEQ ID NO: 83423 - DNA, 40 bp, Homo sapiens
atttatcattaagaaaaaggtttaaagtgaccccaacaca

SEQ ID NO: 83424 - DNA, 40 bp, Homo sapiens
gtgttggggtcactttaaacctttttcttaatgataaata

SEQ ID NO: 83425 - DNA, 40 bp, Homo sapiens
tatttatcattaagaaaaaggtttaaagtgaccccaacac

SEQ ID NO: 83426 - DNA, 40 bp, Homo sapiens
tgttggggtcactttaaacctttttcttaatgataaatat

SEQ ID NO: 83427 - DNA, 40 bp, Homo sapiens
atatttatcattaagaaaaaggtttaaagtgaccccaaca

SEQ ID NO: 83428 - DNA, 40 bp, Homo sapiens
gttggggtcactttaaacctttttcttaatgataaatata

SEQ ID NO: 83429 - DNA, 40 bp, Homo sapiens
tatatttatcattaagaaaaaggtttaaagtgaccccaac

SEQ ID NO: 83430 - DNA, 40 bp, Homo sapiens
ttggggtcactttaaacctttttcttaatgataaatatat

SEQ ID NO: 83431 - DNA, 40 bp, Homo sapiens
atatatttatcattaagaaaaaggtttaaagtgaccccaa

SEQ ID NO: 83432 - DNA, 40 bp, Homo sapiens
tggggtcactttaaacctttttcttaatgataaatatatg

SEQ ID NO: 83433 - DNA, 40 bp, Homo sapiens
catatatttatcattaagaaaaaggtttaaagtgacccca

SEQ ID NO: 83434 - DNA, 40 bp, Homo sapiens
ggggtcactttaaacctttttcttaatgataaatatatga

SEQ ID NO: 83435 - DNA, 40 bp, Homo sapiens
tcatatatttatcattaagaaaaaggtttaaagtgacccc

SEQ ID NO: 83436 - DNA, 40 bp, Homo sapiens
gggtcactttaaacctttttcttaatgataaatatatgaa

SEQ ID NO: 83437 - DNA, 40 bp, Homo sapiens
ttcatatatttatcattaagaaaaaggtttaaagtgaccc

SEQ ID NO: 83438 - DNA, 40 bp, Homo sapiens
ggtcactttaaacctttttcttaatgataaatatatgaat

SEQ ID NO: 83439 - DNA, 40 bp, Homo sapiens
attcatatatttatcattaagaaaaaggtttaaagtgacc

SEQ ID NO: 83440 - DNA, 40 bp, Homo sapiens
gtcactttaaacctttttcttaatgataaatatatgaatt

SEQ ID NO: 83441 - DNA, 40 bp, Homo sapiens
aattcatatatttatcattaagaaaaaggtttaaagtgac

SEQ ID NO: 83442 - DNA, 40 bp, Homo sapiens
tcactttaaacctttttcttaatgataaatatatgaattg

SEQ ID NO: 83443 - DNA, 40 bp, Homo sapiens
caattcatatatttatcattaagaaaaaggtttaaagtga

SEQ ID NO: 83444 - DNA, 40 bp, Homo sapiens
cactttaaacctttttcttaatgataaatatatgaattga

SEQ ID NO: 83445 - DNA, 40 bp, Homo sapiens
tcaattcatatatttatcattaagaaaaaggtttaaagtg

SEQ ID NO: 83446 - DNA, 40 bp, Homo sapiens
actttaaacctttttcttaatgataaatatatgaattgaa

SEQ ID NO: 83447 - DNA, 40 bp, Homo sapiens
ttcaattcatatatttatcattaagaaaaaggtttaaagt

SEQ ID NO: 83448 - DNA, 40 bp, Homo sapiens
ctttaaacctttttcttaatgataaatatatgaattgaaa

SEQ ID NO: 83449 - DNA, 40 bp, Homo sapiens
tttcaattcatatatttatcattaagaaaaaggtttaaag

SEQ ID NO: 83450 - DNA, 40 bp, Homo sapiens
tttaaacctttttcttaatgataaatatatgaattgaaac

SEQ ID NO: 83451 - DNA, 40 bp, Homo sapiens
gtttcaattcatatatttatcattaagaaaaaggtttaaa

SEQ ID NO: 83452 - DNA, 40 bp, Homo sapiens
ttaaacctttttcttaatgataaatatatgaattgaaact

SEQ ID NO: 83453 - DNA, 40 bp, Homo sapiens
agtttcaattcatatatttatcattaagaaaaaggtttaa

SEQ ID NO: 83454 - DNA, 40 bp, Homo sapiens
taaacctttttcttaatgataaatatatgaattgaaacta

SEQ ID NO: 83455 - DNA, 40 bp, Homo sapiens
tagtttcaattcatatatttatcattaagaaaaaggttta

SEQ ID NO: 83456 - DNA, 40 bp, Homo sapiens
aaacctttttcttaatgataaatatatgaattgaaactaa

SEQ ID NO: 83457 - DNA, 40 bp, Homo sapiens
ttagtttcaattcatatatttatcattaagaaaaaggttt

SEQ ID NO: 83458 - DNA, 40 bp, Homo sapiens
aacctttttcttaatgataaatatatgaattgaaactaat

SEQ ID NO: 83459 - DNA, 40 bp, Homo sapiens
attagtttcaattcatatatttatcattaagaaaaaggtt

SEQ ID NO: 83460 - DNA, 40 bp, Homo sapiens
acctttttcttaatgataaatatatgaattgaaactaatc

SEQ ID NO: 83461 - DNA, 40 bp, Homo sapiens
gattagtttcaattcatatatttatcattaagaaaaaggt

SEQ ID NO: 83462 - DNA, 40 bp, Homo sapiens
cctttttcttaatgataaatatatgaattgaaactaatcc

SEQ ID NO: 83463 - DNA, 40 bp, Homo sapiens
ggattagtttcaattcatatatttatcattaagaaaaagg

SEQ ID NO: 83464 - DNA, 40 bp, Homo sapiens
ctttttcttaatgataaatatatgaattgaaactaatccc

SEQ ID NO: 83465 - DNA, 40 bp, Homo sapiens
gggattagtttcaattcatatatttatcattaagaaaaag

SEQ ID NO: 83466 - DNA, 40 bp, Homo sapiens
tttttcttaatgataaatatatgaattgaaactaatccct

SEQ ID NO: 83467 - DNA, 40 bp, Homo sapiens
agggattagtttcaattcatatatttatcattaagaaaaa

SEQ ID NO: 83468 - DNA, 40 bp, Homo sapiens
ttttcttaatgataaatatatgaattgaaactaatccctt

SEQ ID NO: 83469 - DNA, 40 bp, Homo sapiens
aagggattagtttcaattcatatatttatcattaagaaaa

SEQ ID NO: 83470 - DNA, 40 bp, Homo sapiens
tttcttaatgataaatatatgaattgaaactaatccctta

SEQ ID NO: 83471 - DNA, 40 bp, Homo sapiens
taagggattagtttcaattcatatatttatcattaagaaa

SEQ ID NO: 83472 - DNA, 40 bp, Homo sapiens
ttcttaatgataaatatatgaattgaaactaatcccttaa

SEQ ID NO: 83473 - DNA, 40 bp, Homo sapiens
ttaagggattagtttcaattcatatatttatcattaagaa

SEQ ID NO: 83474 - DNA, 40 bp, Homo sapiens
tcttaatgataaatatatgaattgaaactaatcccttaat

SEQ ID NO: 83475 - DNA, 40 bp, Homo sapiens
attaagggattagtttcaattcatatatttatcattaaga

SEQ ID NO: 83476 - DNA, 40 bp, Homo sapiens
cttaatgataaatatatgaattgaaactaatcccttaata

SEQ ID NO: 83477 - DNA, 40 bp, Homo sapiens
tattaagggattagtttcaattcatatatttatcattaag

SEQ ID NO: 83478 - DNA, 40 bp, Homo sapiens
ttaatgataaatatatgaattgaaactaatcccttaatat

SEQ ID NO: 83479 - DNA, 40 bp, Homo sapiens
atattaagggattagtttcaattcatatatttatcattaa

SEQ ID NO: 83480 - DNA, 40 bp, Homo sapiens
taatgataaatatatgaattgaaactaatcccttaatata

SEQ ID NO: 83481 - DNA, 40 bp, Homo sapiens
tatattaagggattagtttcaattcatatatttatcatta

SEQ ID NO: 83482 - DNA, 40 bp, Homo sapiens
aatgataaatatatgaattgaaactaatcccttaatatat

SEQ ID NO: 83483 - DNA, 40 bp, Homo sapiens
atatattaagggattagtttcaattcatatatttatcatt

SEQ ID NO: 83484 - DNA, 40 bp, Homo sapiens
atgataaatatatgaattgaaactaatcccttaatatata

SEQ ID NO: 83485 - DNA, 40 bp, Homo sapiens
tatatattaagggattagtttcaattcatatatttatcat

SEQ ID NO: 83486 - DNA, 40 bp, Homo sapiens
tgataaatatatgaattgaaactaatcccttaatatatat

SEQ ID NO: 83487 - DNA, 40 bp, Homo sapiens
atatatattaagggattagtttcaattcatatatttatca

SEQ ID NO: 83488 - DNA, 40 bp, Homo sapiens
gataaatatatgaattgaaactaatcccttaatatatatc

SEQ ID NO: 83489 - DNA, 40 bp, Homo sapiens
gatatatattaagggattagtttcaattcatatatttatc

SEQ ID NO: 83490 - DNA, 40 bp, Homo sapiens
ataaatatatgaattgaaactaatcccttaatatatatca

SEQ ID NO: 83491 - DNA, 40 bp, Homo sapiens
tgatatatattaagggattagtttcaattcatatatttat

SEQ ID NO: 83492 - DNA, 40 bp, Homo sapiens
taaatatatgaattgaaactaatcccttaatatatatcat

SEQ ID NO: 83493 - DNA, 40 bp, Homo sapiens
atgatatatattaagggattagtttcaattcatatattta

SEQ ID NO: 83494 - DNA, 40 bp, Homo sapiens
aaatatatgaattgaaactaatcccttaatatatatcatt

SEQ ID NO: 83495 - DNA, 40 bp, Homo sapiens
aatgatatatattaagggattagtttcaattcatatattt

SEQ ID NO: 83496 - DNA, 40 bp, Homo sapiens
aatatatgaattgaaactaatcccttaatatatatcattt

SEQ ID NO: 83497 - DNA, 40 bp, Homo sapiens
aaatgatatatattaagggattagtttcaattcatatatt

SEQ ID NO: 83498 - DNA, 40 bp, Homo sapiens
atatatgaattgaaactaatcccttaatatatatcatttg

SEQ ID NO: 83499 - DNA, 40 bp, Homo sapiens
caaatgatatatattaagggattagtttcaattcatatat

SEQ ID NO: 83500 - DNA, 40 bp, Homo sapiens
tatatgaattgaaactaatcccttaatatatatcatttga

SEQ ID NO: 83501 - DNA, 40 bp, Homo sapiens
tcaaatgatatatattaagggattagtttcaattcatata

SEQ ID NO: 83502 - DNA, 40 bp, Homo sapiens
atatgaattgaaactaatcccttaatatatatcatttgaa

SEQ ID NO: 83503 - DNA, 40 bp, Homo sapiens
ttcaaatgatatatattaagggattagtttcaattcatat

SEQ ID NO: 83504 - DNA, 40 bp, Homo sapiens
tatgaattgaaactaatcccttaatatatatcatttgaaa

SEQ ID NO: 83505 - DNA, 40 bp, Homo sapiens
tttcaaatgatatatattaagggattagtttcaattcata

SEQ ID NO: 83506 - DNA, 40 bp, Homo sapiens
atgaattgaaactaatcccttaatatatatcatttgaaaa

SEQ ID NO: 83507 - DNA, 40 bp, Homo sapiens
ttttcaaatgatatatattaagggattagtttcaattcat

SEQ ID NO: 83508 - DNA, 40 bp, Homo sapiens
tgaattgaaactaatcccttaatatatatcatttgaaaac

SEQ ID NO: 83509 - DNA, 40 bp, Homo sapiens
gttttcaaatgatatatattaagggattagtttcaattca

SEQ ID NO: 83510 - DNA, 40 bp, Homo sapiens
gaattgaaactaatcccttaatatatatcatttgaaaact

SEQ ID NO: 83511 - DNA, 40 bp, Homo sapiens
agttttcaaatgatatatattaagggattagtttcaattc

SEQ ID NO: 83512 - DNA, 40 bp, Homo sapiens
aattgaaactaatcccttaatatatatcatttgaaaactg

SEQ ID NO: 83513 - DNA, 40 bp, Homo sapiens
cagttttcaaatgatatatattaagggattagtttcaatt

SEQ ID NO: 83514 - DNA, 40 bp, Homo sapiens
attgaaactaatcccttaatatatatcatttgaaaactga

SEQ ID NO: 83515 - DNA, 40 bp, Homo sapiens
tcagttttcaaatgatatatattaagggattagtttcaat

SEQ ID NO: 83516 - DNA, 40 bp, Homo sapiens
ttgaaactaatcccttaatatatatcatttgaaaactgaa

SEQ ID NO: 83517 - DNA, 40 bp, Homo sapiens
ttcagttttcaaatgatatatattaagggattagtttcaa

SEQ ID NO: 83518 - DNA, 40 bp, Homo sapiens
tgaaactaatcccttaatatatatcatttgaaaactgaaa

SEQ ID NO: 83519 - DNA, 40 bp, Homo sapiens
tttcagttttcaaatgatatatattaagggattagtttca

SEQ ID NO: 83520 - DNA, 40 bp, Homo sapiens
gaaactaatcccttaatatatatcatttgaaaactgaaat

SEQ ID NO: 83521 - DNA, 40 bp, Homo sapiens
atttcagttttcaaatgatatatattaagggattagtttc

SEQ ID NO: 83522 - DNA, 40 bp, Homo sapiens
aaactaatcccttaatatatatcatttgaaaactgaaata

SEQ ID NO: 83523 - DNA, 40 bp, Homo sapiens
tatttcagttttcaaatgatatatattaagggattagttt

SEQ ID NO: 83524 - DNA, 40 bp, Homo sapiens
aactaatcccttaatatatatcatttgaaaactgaaataa

SEQ ID NO: 83525 - DNA, 40 bp, Homo sapiens
ttatttcagttttcaaatgatatatattaagggattagtt

SEQ ID NO: 83526 - DNA, 40 bp, Homo sapiens
actaatcccttaatatatatcatttgaaaactgaaataat

SEQ ID NO: 83527 - DNA, 40 bp, Homo sapiens
attatttcagttttcaaatgatatatattaagggattagt

SEQ ID NO: 83528 - DNA, 40 bp, Homo sapiens
ctaatcccttaatatatatcatttgaaaactgaaataata

SEQ ID NO: 83529 - DNA, 40 bp, Homo sapiens
tattatttcagttttcaaatgatatatattaagggattag

SEQ ID NO: 83530 - DNA, 40 bp, Homo sapiens
taatcccttaatatatatcatttgaaaactgaaataatat

SEQ ID NO: 83531 - DNA, 40 bp, Homo sapiens
atattatttcagttttcaaatgatatatattaagggatta

SEQ ID NO: 83532 - DNA, 40 bp, Homo sapiens
aatcccttaatatatatcatttgaaaactgaaataatatg

SEQ ID NO: 83533 - DNA, 40 bp, Homo sapiens
catattatttcagttttcaaatgatatatattaagggatt

SEQ ID NO: 83534 - DNA, 40 bp, Homo sapiens
atcccttaatatatatcatttgaaaactgaaataatatgt

SEQ ID NO: 83535 - DNA, 40 bp, Homo sapiens
acatattatttcagttttcaaatgatatatattaagggat

SEQ ID NO: 83536 - DNA, 40 bp, Homo sapiens
tcccttaatatatatcatttgaaaactgaaataatatgtt

SEQ ID NO: 83537 - DNA, 40 bp, Homo sapiens
aacatattatttcagttttcaaatgatatatattaaggga

SEQ ID NO: 83538 - DNA, 40 bp, Homo sapiens
cccttaatatatatcatttgaaaactgaaataatatgttt

SEQ ID NO: 83539 - DNA, 40 bp, Homo sapiens
aaacatattatttcagttttcaaatgatatatattaaggg

SEQ ID NO: 83540 - DNA, 40 bp, Homo sapiens
ccttaatatatatcatttgaaaactgaaataatatgttta

SEQ ID NO: 83541 - DNA, 40 bp, Homo sapiens
taaacatattatttcagttttcaaatgatatatattaagg

SEQ ID NO: 83542 - DNA, 40 bp, Homo sapiens
cttaatatatatcatttgaaaactgaaataatatgtttag

SEQ ID NO: 83543 - DNA, 40 bp, Homo sapiens
ctaaacatattatttcagttttcaaatgatatatattaag

SEQ ID NO: 83544 - DNA, 40 bp, Homo sapiens
ttaatatatatcatttgaaaactgaaataatatgtttaga

SEQ ID NO: 83545 - DNA, 40 bp, Homo sapiens
tctaaacatattatttcagttttcaaatgatatatattaa

SEQ ID NO: 83546 - DNA, 40 bp, Homo sapiens
taatatatatcatttgaaaactgaaataatatgtttagat

SEQ ID NO: 83547 - DNA, 40 bp, Homo sapiens
atctaaacatattatttcagttttcaaatgatatatatta

SEQ ID NO: 83548 - DNA, 40 bp, Homo sapiens
aatatatatcatttgaaaactgaaataatatgtttagata

SEQ ID NO: 83549 - DNA, 40 bp, Homo sapiens
tatctaaacatattatttcagttttcaaatgatatatatt

SEQ ID NO: 83550 - DNA, 40 bp, Homo sapiens
atatatatcatttgaaaactgaaataatatgtttagatac

SEQ ID NO: 83551 - DNA, 40 bp, Homo sapiens
gtatctaaacatattatttcagttttcaaatgatatatat

SEQ ID NO: 83552 - DNA, 40 bp, Homo sapiens
tatatatcatttgaaaactgaaataatatgtttagatact

SEQ ID NO: 83553 - DNA, 40 bp, Homo sapiens
agtatctaaacatattatttcagttttcaaatgatatata

SEQ ID NO: 83554 - DNA, 40 bp, Homo sapiens
atatatcatttgaaaactgaaataatatgtttagatactg

SEQ ID NO: 83555 - DNA, 40 bp, Homo sapiens
cagtatctaaacatattatttcagttttcaaatgatatat

SEQ ID NO: 83556 - DNA, 40 bp, Homo sapiens
tatatcatttgaaaactgaaataatatgtttagatactgt

SEQ ID NO: 83557 - DNA, 40 bp, Homo sapiens
acagtatctaaacatattatttcagttttcaaatgatata

SEQ ID NO: 83558 - DNA, 40 bp, Homo sapiens
atatcatttgaaaactgaaataatatgtttagatactgtt

SEQ ID NO: 83559 - DNA, 40 bp, Homo sapiens
aacagtatctaaacatattatttcagttttcaaatgatat

SEQ ID NO: 83560 - DNA, 40 bp, Homo sapiens
tatcatttgaaaactgaaataatatgtttagatactgttt

SEQ ID NO: 83561 - DNA, 40 bp, Homo sapiens
aaacagtatctaaacatattatttcagttttcaaatgata

SEQ ID NO: 83562 - DNA, 40 bp, Homo sapiens
atcatttgaaaactgaaataatatgtttagatactgttta

SEQ ID NO: 83563 - DNA, 40 bp, Homo sapiens
taaacagtatctaaacatattatttcagttttcaaatgat

SEQ ID NO: 83564 - DNA, 40 bp, Homo sapiens
tcatttgaaaactgaaataatatgtttagatactgtttac

SEQ ID NO: 83565 - DNA, 40 bp, Homo sapiens
gtaaacagtatctaaacatattatttcagttttcaaatga

SEQ ID NO: 83566 - DNA, 40 bp, Homo sapiens
catttgaaaactgaaataatatgtttagatactgtttact

SEQ ID NO: 83567 - DNA, 40 bp, Homo sapiens
agtaaacagtatctaaacatattatttcagttttcaaatg

SEQ ID NO: 83568 - DNA, 40 bp, Homo sapiens
atttgaaaactgaaataatatgtttagatactgtttactt

SEQ ID NO: 83569 - DNA, 40 bp, Homo sapiens
aagtaaacagtatctaaacatattatttcagttttcaaat

SEQ ID NO: 83570 - DNA, 40 bp, Homo sapiens
tttgaaaactgaaataatatgtttagatactgtttacttg

SEQ ID NO: 83571 - DNA, 40 bp, Homo sapiens
caagtaaacagtatctaaacatattatttcagttttcaaa

SEQ ID NO: 83572 - DNA, 40 bp, Homo sapiens
ttgaaaactgaaataatatgtttagatactgtttacttgt

SEQ ID NO: 83573 - DNA, 40 bp, Homo sapiens
acaagtaaacagtatctaaacatattatttcagttttcaa

SEQ ID NO: 83574 - DNA, 40 bp, Homo sapiens
tgaaaactgaaataatatgtttagatactgtttacttgtt

SEQ ID NO: 83575 - DNA, 40 bp, Homo sapiens
aacaagtaaacagtatctaaacatattatttcagttttca

SEQ ID NO: 83576 - DNA, 40 bp, Homo sapiens
gaaaactgaaataatatgtttagatactgtttacttgttg

SEQ ID NO: 83577 - DNA, 40 bp, Homo sapiens
caacaagtaaacagtatctaaacatattatttcagttttc

SEQ ID NO: 83578 - DNA, 40 bp, Homo sapiens
aaaactgaaataatatgtttagatactgtttacttgttga

SEQ ID NO: 83579 - DNA, 40 bp, Homo sapiens
tcaacaagtaaacagtatctaaacatattatttcagtttt

SEQ ID NO: 83580 - DNA, 40 bp, Homo sapiens
aaactgaaataatatgtttagatactgtttacttgttgat

SEQ ID NO: 83581 - DNA, 40 bp, Homo sapiens
atcaacaagtaaacagtatctaaacatattatttcagttt

SEQ ID NO: 83582 - DNA, 40 bp, Homo sapiens
aactgaaataatatgtttagatactgtttacttgttgata

SEQ ID NO: 83583 - DNA, 40 bp, Homo sapiens
tatcaacaagtaaacagtatctaaacatattatttcagtt

SEQ ID NO: 83584 - DNA, 40 bp, Homo sapiens
actgaaataatatgtttagatactgtttacttgttgataa

SEQ ID NO: 83585 - DNA, 40 bp, Homo sapiens
ttatcaacaagtaaacagtatctaaacatattatttcagt

SEQ ID NO: 83586 - DNA, 40 bp, Homo sapiens
ctgaaataatatgtttagatactgtttacttgttgataaa

SEQ ID NO: 83587 - DNA, 40 bp, Homo sapiens
tttatcaacaagtaaacagtatctaaacatattatttcag

SEQ ID NO: 83588 - DNA, 40 bp, Homo sapiens
tgaaataatatgtttagatactgtttacttgttgataaat

SEQ ID NO: 83589 - DNA, 40 bp, Homo sapiens
atttatcaacaagtaaacagtatctaaacatattatttca

SEQ ID NO: 83590 - DNA, 40 bp, Homo sapiens
gaaataatatgtttagatactgtttacttgttgataaatt

SEQ ID NO: 83591 - DNA, 40 bp, Homo sapiens
aatttatcaacaagtaaacagtatctaaacatattatttc

SEQ ID NO: 83592 - DNA, 40 bp, Homo sapiens
aaataatatgtttagatactgtttacttgttgataaatta

SEQ ID NO: 83593 - DNA, 40 bp, Homo sapiens
taatttatcaacaagtaaacagtatctaaacatattattt

SEQ ID NO: 83594 - DNA, 40 bp, Homo sapiens
aataatatgtttagatactgtttacttgttgataaattat

SEQ ID NO: 83595 - DNA, 40 bp, Homo sapiens
ataatttatcaacaagtaaacagtatctaaacatattatt

SEQ ID NO: 83596 - DNA, 40 bp, Homo sapiens
ataatatgtttagatactgtttacttgttgataaattatt

SEQ ID NO: 83597 - DNA, 40 bp, Homo sapiens
aataatttatcaacaagtaaacagtatctaaacatattat

SEQ ID NO: 83598 - DNA, 40 bp, Homo sapiens
taatatgtttagatactgtttacttgttgataaattattg

SEQ ID NO: 83599 - DNA, 40 bp, Homo sapiens
caataatttatcaacaagtaaacagtatctaaacatatta

SEQ ID NO: 83600 - DNA, 40 bp, Homo sapiens
aatatgtttagatactgtttacttgttgataaattattgg

SEQ ID NO: 83601 - DNA, 40 bp, Homo sapiens
ccaataatttatcaacaagtaaacagtatctaaacatatt

SEQ ID NO: 83602 - DNA, 40 bp, Homo sapiens
atatgtttagatactgtttacttgttgataaattattgga

SEQ ID NO: 83603 - DNA, 40 bp, Homo sapiens
tccaataatttatcaacaagtaaacagtatctaaacatat

SEQ ID NO: 83604 - DNA, 40 bp, Homo sapiens
tatgtttagatactgtttacttgttgataaattattggaa

SEQ ID NO: 83605 - DNA, 40 bp, Homo sapiens
ttccaataatttatcaacaagtaaacagtatctaaacata

SEQ ID NO: 83606 - DNA, 40 bp, Homo sapiens
atgtttagatactgtttacttgttgataaattattggaat

SEQ ID NO: 83607 - DNA, 40 bp, Homo sapiens
attccaataatttatcaacaagtaaacagtatctaaacat

SEQ ID NO: 83608 - DNA, 40 bp, Homo sapiens
tgtttagatactgtttacttgttgataaattattggaata

SEQ ID NO: 83609 - DNA, 40 bp, Homo sapiens
tattccaataatttatcaacaagtaaacagtatctaaaca

SEQ ID NO: 83610 - DNA, 40 bp, Homo sapiens
gtttagatactgtttacttgttgataaattattggaatag

SEQ ID NO: 83611 - DNA, 40 bp, Homo sapiens
ctattccaataatttatcaacaagtaaacagtatctaaac

SEQ ID NO: 83612 - DNA, 40 bp, Homo sapiens
tttagatactgtttacttgttgataaattattggaatagg

SEQ ID NO: 83613 - DNA, 40 bp, Homo sapiens
cctattccaataatttatcaacaagtaaacagtatctaaa

SEQ ID NO: 83614 - DNA, 40 bp, Homo sapiens
ttagatactgtttacttgttgataaattattggaatagga

SEQ ID NO: 83615 - DNA, 40 bp, Homo sapiens
tcctattccaataatttatcaacaagtaaacagtatctaa

SEQ ID NO: 83616 - DNA, 40 bp, Homo sapiens
tagatactgtttacttgttgataaattattggaataggat

SEQ ID NO: 83617 - DNA, 40 bp, Homo sapiens
atcctattccaataatttatcaacaagtaaacagtatcta

SEQ ID NO: 83618 - DNA, 40 bp, Homo sapiens
agatactgtttacttgttgataaattattggaataggatg

SEQ ID NO: 83619 - DNA, 40 bp, Homo sapiens
catcctattccaataatttatcaacaagtaaacagtatct

SEQ ID NO: 83620 - DNA, 40 bp, Homo sapiens
gatactgtttacttgttgataaattattggaataggatgt

SEQ ID NO: 83621 - DNA, 40 bp, Homo sapiens
acatcctattccaataatttatcaacaagtaaacagtatc

SEQ ID NO: 83622 - DNA, 40 bp, Homo sapiens
atactgtttacttgttgataaattattggaataggatgtt

SEQ ID NO: 83623 - DNA, 40 bp, Homo sapiens
aacatcctattccaataatttatcaacaagtaaacagtat

SEQ ID NO: 83624 - DNA, 40 bp, Homo sapiens
tactgtttacttgttgataaattattggaataggatgttc

SEQ ID NO: 83625 - DNA, 40 bp, Homo sapiens
gaacatcctattccaataatttatcaacaagtaaacagta

SEQ ID NO: 83626 - DNA, 40 bp, Homo sapiens
actgtttacttgttgataaattattggaataggatgttcg

SEQ ID NO: 83627 - DNA, 40 bp, Homo sapiens
cgaacatcctattccaataatttatcaacaagtaaacagt

SEQ ID NO: 83628 - DNA, 40 bp, Homo sapiens
ctgtttacttgttgataaattattggaataggatgttcga

SEQ ID NO: 83629 - DNA, 40 bp, Homo sapiens
tcgaacatcctattccaataatttatcaacaagtaaacag

SEQ ID NO: 83630 - DNA, 40 bp, Homo sapiens
tgtttacttgttgataaattattggaataggatgttcgaa

SEQ ID NO: 83631 - DNA, 40 bp, Homo sapiens
ttcgaacatcctattccaataatttatcaacaagtaaaca

SEQ ID NO: 83632 - DNA, 40 bp, Homo sapiens
gtttacttgttgataaattattggaataggatgttcgaat

SEQ ID NO: 83633 - DNA, 40 bp, Homo sapiens
attcgaacatcctattccaataatttatcaacaagtaaac

SEQ ID NO: 83634 - DNA, 40 bp, Homo sapiens
tttacttgttgataaattattggaataggatgttcgaata

SEQ ID NO: 83635 - DNA, 40 bp, Homo sapiens
tattcgaacatcctattccaataatttatcaacaagtaaa

SEQ ID NO: 83636 - DNA, 40 bp, Homo sapiens
ttacttgttgataaattattggaataggatgttcgaatac

SEQ ID NO: 83637 - DNA, 40 bp, Homo sapiens
gtattcgaacatcctattccaataatttatcaacaagtaa

SEQ ID NO: 83638 - DNA, 40 bp, Homo sapiens
tacttgttgataaattattggaataggatgttcgaatact

SEQ ID NO: 83639 - DNA, 40 bp, Homo sapiens
agtattcgaacatcctattccaataatttatcaacaagta

SEQ ID NO: 83640 - DNA, 40 bp, Homo sapiens
acttgttgataaattattggaataggatgttcgaatactg

SEQ ID NO: 83641 - DNA, 40 bp, Homo sapiens
cagtattcgaacatcctattccaataatttatcaacaagt

SEQ ID NO: 83642 - DNA, 40 bp, Homo sapiens
cttgttgataaattattggaataggatgttcgaatactgt

SEQ ID NO: 83643 - DNA, 40 bp, Homo sapiens
acagtattcgaacatcctattccaataatttatcaacaag

SEQ ID NO: 83644 - DNA, 40 bp, Homo sapiens
ttgttgataaattattggaataggatgttcgaatactgtt

SEQ ID NO: 83645 - DNA, 40 bp, Homo sapiens
aacagtattcgaacatcctattccaataatttatcaacaa

SEQ ID NO: 83646 - DNA, 40 bp, Homo sapiens
tgttgataaattattggaataggatgttcgaatactgttt

SEQ ID NO: 83647 - DNA, 40 bp, Homo sapiens
aaacagtattcgaacatcctattccaataatttatcaaca

SEQ ID NO: 83648 - DNA, 40 bp, Homo sapiens
gttgataaattattggaataggatgttcgaatactgttta

SEQ ID NO: 83649 - DNA, 40 bp, Homo sapiens
taaacagtattcgaacatcctattccaataatttatcaac

SEQ ID NO: 83650 - DNA, 40 bp, Homo sapiens
ttgataaattattggaataggatgttcgaatactgtttac

SEQ ID NO: 83651 - DNA, 40 bp, Homo sapiens
gtaaacagtattcgaacatcctattccaataatttatcaa

SEQ ID NO: 83652 - DNA, 40 bp, Homo sapiens
tgataaattattggaataggatgttcgaatactgtttact

SEQ ID NO: 83653 - DNA, 40 bp, Homo sapiens
agtaaacagtattcgaacatcctattccaataatttatca

SEQ ID NO: 83654 - DNA, 40 bp, Homo sapiens
gataaattattggaataggatgttcgaatactgtttactt

SEQ ID NO: 83655 - DNA, 40 bp, Homo sapiens
aagtaaacagtattcgaacatcctattccaataatttatc

SEQ ID NO: 83656 - DNA, 40 bp, Homo sapiens
ataaattattggaataggatgttcgaatactgtttacttc

SEQ ID NO: 83657 - DNA, 40 bp, Homo sapiens
gaagtaaacagtattcgaacatcctattccaataatttat

SEQ ID NO: 83658 - DNA, 40 bp, Homo sapiens
taaattattggaataggatgttcgaatactgtttacttct

SEQ ID NO: 83659 - DNA, 40 bp, Homo sapiens
agaagtaaacagtattcgaacatcctattccaataattta

SEQ ID NO: 83660 - DNA, 40 bp, Homo sapiens
aaattattggaataggatgttcgaatactgtttacttctt

SEQ ID NO: 83661 - DNA, 40 bp, Homo sapiens
aagaagtaaacagtattcgaacatcctattccaataattt

SEQ ID NO: 83662 - DNA, 40 bp, Homo sapiens
aattattggaataggatgttcgaatactgtttacttcttg

SEQ ID NO: 83663 - DNA, 40 bp, Homo sapiens
caagaagtaaacagtattcgaacatcctattccaataatt

SEQ ID NO: 83664 - DNA, 40 bp, Homo sapiens
attattggaataggatgttcgaatactgtttacttcttgg

SEQ ID NO: 83665 - DNA, 40 bp, Homo sapiens
ccaagaagtaaacagtattcgaacatcctattccaataat

SEQ ID NO: 83666 - DNA, 40 bp, Homo sapiens
ttattggaataggatgttcgaatactgtttacttcttggt

SEQ ID NO: 83667 - DNA, 40 bp, Homo sapiens
accaagaagtaaacagtattcgaacatcctattccaataa

SEQ ID NO: 83668 - DNA, 40 bp, Homo sapiens
tattggaataggatgttcgaatactgtttacttcttggta

SEQ ID NO: 83669 - DNA, 40 bp, Homo sapiens
taccaagaagtaaacagtattcgaacatcctattccaata

SEQ ID NO: 83670 - DNA, 40 bp, Homo sapiens
attggaataggatgttcgaatactgtttacttcttggtaa

SEQ ID NO: 83671 - DNA, 40 bp, Homo sapiens
ttaccaagaagtaaacagtattcgaacatcctattccaat

SEQ ID NO: 83672 - DNA, 40 bp, Homo sapiens
ttggaataggatgttcgaatactgtttacttcttggtaaa

SEQ ID NO: 83673 - DNA, 40 bp, Homo sapiens
tttaccaagaagtaaacagtattcgaacatcctattccaa

SEQ ID NO: 83674 - DNA, 40 bp, Homo sapiens
tggaataggatgttcgaatactgtttacttcttggtaaat

SEQ ID NO: 83675 - DNA, 40 bp, Homo sapiens
atttaccaagaagtaaacagtattcgaacatcctattcca

SEQ ID NO: 83676 - DNA, 40 bp, Homo sapiens
ggaataggatgttcgaatactgtttacttcttggtaaatt

SEQ ID NO: 83677 - DNA, 40 bp, Homo sapiens
aatttaccaagaagtaaacagtattcgaacatcctattcc

SEQ ID NO: 83678 - DNA, 40 bp, Homo sapiens
gaataggatgttcgaatactgtttacttcttggtaaattt

SEQ ID NO: 83679 - DNA, 40 bp, Homo sapiens
aaatttaccaagaagtaaacagtattcgaacatcctattc

SEQ ID NO: 83680 - DNA, 40 bp, Homo sapiens
aataggatgttcgaatactgtttacttcttggtaaatttt

SEQ ID NO: 83681 - DNA, 40 bp, Homo sapiens
aaaatttaccaagaagtaaacagtattcgaacatcctatt

SEQ ID NO: 83682 - DNA, 40 bp, Homo sapiens
ataggatgttcgaatactgtttacttcttggtaaattttt

SEQ ID NO: 83683 - DNA, 40 bp, Homo sapiens
aaaaatttaccaagaagtaaacagtattcgaacatcctat

SEQ ID NO: 83684 - DNA, 40 bp, Homo sapiens
taggatgttcgaatactgtttacttcttggtaaattttta

SEQ ID NO: 83685 - DNA, 40 bp, Homo sapiens
taaaaatttaccaagaagtaaacagtattcgaacatccta

SEQ ID NO: 83686 - DNA, 40 bp, Homo sapiens
aggatgttcgaatactgtttacttcttggtaaatttttaa

SEQ ID NO: 83687 - DNA, 40 bp, Homo sapiens
ttaaaaatttaccaagaagtaaacagtattcgaacatcct

SEQ ID NO: 83688 - DNA, 40 bp, Homo sapiens
ggatgttcgaatactgtttacttcttggtaaatttttaaa

SEQ ID NO: 83689 - DNA, 40 bp, Homo sapiens
tttaaaaatttaccaagaagtaaacagtattcgaacatcc

SEQ ID NO: 83690 - DNA, 40 bp, Homo sapiens
gatgttcgaatactgtttacttcttggtaaatttttaaat

SEQ ID NO: 83691 - DNA, 40 bp, Homo sapiens
atttaaaaatttaccaagaagtaaacagtattcgaacatc

SEQ ID NO: 83692 - DNA, 40 bp, Homo sapiens
atgttcgaatactgtttacttcttggtaaatttttaaatc

SEQ ID NO: 83693 - DNA, 40 bp, Homo sapiens
gatttaaaaatttaccaagaagtaaacagtattcgaacat

SEQ ID NO: 83694 - DNA, 40 bp, Homo sapiens
tgttcgaatactgtttacttcttggtaaatttttaaatcc

SEQ ID NO: 83695 - DNA, 40 bp, Homo sapiens
ggatttaaaaatttaccaagaagtaaacagtattcgaaca

SEQ ID NO: 83696 - DNA, 40 bp, Homo sapiens
gttcgaatactgtttacttcttggtaaatttttaaatcca

SEQ ID NO: 83697 - DNA, 40 bp, Homo sapiens
tggatttaaaaatttaccaagaagtaaacagtattcgaac

SEQ ID NO: 83698 - DNA, 40 bp, Homo sapiens
ttcgaatactgtttacttcttggtaaatttttaaatccaa

SEQ ID NO: 83699 - DNA, 40 bp, Homo sapiens
ttggatttaaaaatttaccaagaagtaaacagtattcgaa

SEQ ID NO: 83700 - DNA, 40 bp, Homo sapiens
tcgaatactgtttacttcttggtaaatttttaaatccaat

SEQ ID NO: 83701 - DNA, 40 bp, Homo sapiens
attggatttaaaaatttaccaagaagtaaacagtattcga

SEQ ID NO: 83702 - DNA, 40 bp, Homo sapiens
cgaatactgtttacttcttggtaaatttttaaatccaatg

SEQ ID NO: 83703 - DNA, 40 bp, Homo sapiens
cattggatttaaaaatttaccaagaagtaaacagtattcg

SEQ ID NO: 83704 - DNA, 40 bp, Homo sapiens
gaatactgtttacttcttggtaaatttttaaatccaatgg

SEQ ID NO: 83705 - DNA, 40 bp, Homo sapiens
ccattggatttaaaaatttaccaagaagtaaacagtattc

SEQ ID NO: 83706 - DNA, 40 bp, Homo sapiens
aatactgtttacttcttggtaaatttttaaatccaatgga

SEQ ID NO: 83707 - DNA, 40 bp, Homo sapiens
tccattggatttaaaaatttaccaagaagtaaacagtatt

SEQ ID NO: 83708 - DNA, 40 bp, Homo sapiens
atactgtttacttcttggtaaatttttaaatccaatggat

SEQ ID NO: 83709 - DNA, 40 bp, Homo sapiens
atccattggatttaaaaatttaccaagaagtaaacagtat

SEQ ID NO: 83710 - DNA, 40 bp, Homo sapiens
tactgtttacttcttggtaaatttttaaatccaatggatt

SEQ ID NO: 83711 - DNA, 40 bp, Homo sapiens
aatccattggatttaaaaatttaccaagaagtaaacagta

SEQ ID NO: 83712 - DNA, 40 bp, Homo sapiens
actgtttacttcttggtaaatttttaaatccaatggattt

SEQ ID NO: 83713 - DNA, 40 bp, Homo sapiens
aaatccattggatttaaaaatttaccaagaagtaaacagt

SEQ ID NO: 83714 - DNA, 40 bp, Homo sapiens
ctgtttacttcttggtaaatttttaaatccaatggatttt

SEQ ID NO: 83715 - DNA, 40 bp, Homo sapiens
aaaatccattggatttaaaaatttaccaagaagtaaacag

SEQ ID NO: 83716 - DNA, 40 bp, Homo sapiens
tgtttacttcttggtaaatttttaaatccaatggatttta

SEQ ID NO: 83717 - DNA, 40 bp, Homo sapiens
taaaatccattggatttaaaaatttaccaagaagtaaaca

SEQ ID NO: 83718 - DNA, 40 bp, Homo sapiens
gtttacttcttggtaaatttttaaatccaatggattttac

SEQ ID NO: 83719 - DNA, 40 bp, Homo sapiens
gtaaaatccattggatttaaaaatttaccaagaagtaaac

SEQ ID NO: 83720 - DNA, 40 bp, Homo sapiens
tttacttcttggtaaatttttaaatccaatggattttacg

SEQ ID NO: 83721 - DNA, 40 bp, Homo sapiens
cgtaaaatccattggatttaaaaatttaccaagaagtaaa

SEQ ID NO: 83722 - DNA, 40 bp, Homo sapiens
ttacttcttggtaaatttttaaatccaatggattttacgt

SEQ ID NO: 83723 - DNA, 40 bp, Homo sapiens
acgtaaaatccattggatttaaaaatttaccaagaagtaa

SEQ ID NO: 83724 - DNA, 40 bp, Homo sapiens
tacttcttggtaaatttttaaatccaatggattttacgta

SEQ ID NO: 83725 - DNA, 40 bp, Homo sapiens
tacgtaaaatccattggatttaaaaatttaccaagaagta

SEQ ID NO: 83726 - DNA, 40 bp, Homo sapiens
acttcttggtaaatttttaaatccaatggattttacgtaa

SEQ ID NO: 83727 - DNA, 40 bp, Homo sapiens
ttacgtaaaatccattggatttaaaaatttaccaagaagt

SEQ ID NO: 83728 - DNA, 40 bp, Homo sapiens
cttcttggtaaatttttaaatccaatggattttacgtaag

SEQ ID NO: 83729 - DNA, 40 bp, Homo sapiens
cttacgtaaaatccattggatttaaaaatttaccaagaag

SEQ ID NO: 83730 - DNA, 40 bp, Homo sapiens
ttcttggtaaatttttaaatccaatggattttacgtaagt

SEQ ID NO: 83731 - DNA, 40 bp, Homo sapiens
acttacgtaaaatccattggatttaaaaatttaccaagaa

SEQ ID NO: 83732 - DNA, 40 bp, Homo sapiens
tcttggtaaatttttaaatccaatggattttacgtaagta

SEQ ID NO: 83733 - DNA, 40 bp, Homo sapiens
tacttacgtaaaatccattggatttaaaaatttaccaaga

SEQ ID NO: 83734 - DNA, 40 bp, Homo sapiens
cttggtaaatttttaaatccaatggattttacgtaagtat

SEQ ID NO: 83735 - DNA, 40 bp, Homo sapiens
atacttacgtaaaatccattggatttaaaaatttaccaag

SEQ ID NO: 83736 - DNA, 40 bp, Homo sapiens
ttggtaaatttttaaatccaatggattttacgtaagtata

SEQ ID NO: 83737 - DNA, 40 bp, Homo sapiens
tatacttacgtaaaatccattggatttaaaaatttaccaa

SEQ ID NO: 83738 - DNA, 40 bp, Homo sapiens
tggtaaatttttaaatccaatggattttacgtaagtatag

SEQ ID NO: 83739 - DNA, 40 bp, Homo sapiens
ctatacttacgtaaaatccattggatttaaaaatttacca

SEQ ID NO: 83740 - DNA, 40 bp, Homo sapiens
ggtaaatttttaaatccaatggattttacgtaagtataga

SEQ ID NO: 83741 - DNA, 40 bp, Homo sapiens
tctatacttacgtaaaatccattggatttaaaaatttacc

SEQ ID NO: 83742 - DNA, 40 bp, Homo sapiens
gtaaatttttaaatccaatggattttacgtaagtatagaa

SEQ ID NO: 83743 - DNA, 40 bp, Homo sapiens
ttctatacttacgtaaaatccattggatttaaaaatttac

SEQ ID NO: 83744 - DNA, 40 bp, Homo sapiens
taaatttttaaatccaatggattttacgtaagtatagaac

SEQ ID NO: 83745 - DNA, 40 bp, Homo sapiens
gttctatacttacgtaaaatccattggatttaaaaattta

SEQ ID NO: 83746 - DNA, 40 bp, Homo sapiens
aaatttttaaatccaatggattttacgtaagtatagaact

SEQ ID NO: 83747 - DNA, 40 bp, Homo sapiens
agttctatacttacgtaaaatccattggatttaaaaattt

SEQ ID NO: 83748 - DNA, 40 bp, Homo sapiens
aatttttaaatccaatggattttacgtaagtatagaactg

SEQ ID NO: 83749 - DNA, 40 bp, Homo sapiens
cagttctatacttacgtaaaatccattggatttaaaaatt

SEQ ID NO: 83750 - DNA, 40 bp, Homo sapiens
atttttaaatccaatggattttacgtaagtatagaactgg

SEQ ID NO: 83751 - DNA, 40 bp, Homo sapiens
ccagttctatacttacgtaaaatccattggatttaaaaat

SEQ ID NO: 83752 - DNA, 40 bp, Homo sapiens
tttttaaatccaatggattttacgtaagtatagaactgga

SEQ ID NO: 83753 - DNA, 40 bp, Homo sapiens
tccagttctatacttacgtaaaatccattggatttaaaaa

SEQ ID NO: 83754 - DNA, 40 bp, Homo sapiens
ttttaaatccaatggattttacgtaagtatagaactggag

SEQ ID NO: 83755 - DNA, 40 bp, Homo sapiens
ctccagttctatacttacgtaaaatccattggatttaaaa

SEQ ID NO: 83756 - DNA, 40 bp, Homo sapiens
tttaaatccaatggattttacgtaagtatagaactggagc

SEQ ID NO: 83757 - DNA, 40 bp, Homo sapiens
gctccagttctatacttacgtaaaatccattggatttaaa

SEQ ID NO: 83758 - DNA, 40 bp, Homo sapiens
ttaaatccaatggattttacgtaagtatagaactggagct

SEQ ID NO: 83759 - DNA, 40 bp, Homo sapiens
agctccagttctatacttacgtaaaatccattggatttaa

SEQ ID NO: 83760 - DNA, 40 bp, Homo sapiens
taaatccaatggattttacgtaagtatagaactggagctc

SEQ ID NO: 83761 - DNA, 40 bp, Homo sapiens
gagctccagttctatacttacgtaaaatccattggattta

SEQ ID NO: 83762 - DNA, 40 bp, Homo sapiens
aaatccaatggattttacgtaagtatagaactggagctca

SEQ ID NO: 83763 - DNA, 40 bp, Homo sapiens
tgagctccagttctatacttacgtaaaatccattggattt

SEQ ID NO: 83764 - DNA, 40 bp, Homo sapiens
aatccaatggattttacgtaagtatagaactggagctcaa

SEQ ID NO: 83765 - DNA, 40 bp, Homo sapiens
ttgagctccagttctatacttacgtaaaatccattggatt

SEQ ID NO: 83766 - DNA, 40 bp, Homo sapiens
atccaatggattttacgtaagtatagaactggagctcaaa

SEQ ID NO: 83767 - DNA, 40 bp, Homo sapiens
tttgagctccagttctatacttacgtaaaatccattggat

SEQ ID NO: 83768 - DNA, 40 bp, Homo sapiens
tccaatggattttacgtaagtatagaactggagctcaaat

SEQ ID NO: 83769 - DNA, 40 bp, Homo sapiens
atttgagctccagttctatacttacgtaaaatccattgga

SEQ ID NO: 83770 - DNA, 40 bp, Homo sapiens
ccaatggattttacgtaagtatagaactggagctcaaata

SEQ ID NO: 83771 - DNA, 40 bp, Homo sapiens
tatttgagctccagttctatacttacgtaaaatccattgg

SEQ ID NO: 83772 - DNA, 40 bp, Homo sapiens
caatggattttacgtaagtatagaactggagctcaaatac

SEQ ID NO: 83773 - DNA, 40 bp, Homo sapiens
gtatttgagctccagttctatacttacgtaaaatccattg

SEQ ID NO: 83774 - DNA, 40 bp, Homo sapiens
aatggattttacgtaagtatagaactggagctcaaatact

SEQ ID NO: 83775 - DNA, 40 bp, Homo sapiens
agtatttgagctccagttctatacttacgtaaaatccatt

SEQ ID NO: 83776 - DNA, 40 bp, Homo sapiens
atggattttacgtaagtatagaactggagctcaaatactg

SEQ ID NO: 83777 - DNA, 40 bp, Homo sapiens
cagtatttgagctccagttctatacttacgtaaaatccat

SEQ ID NO: 83778 - DNA, 40 bp, Homo sapiens
tggattttacgtaagtatagaactggagctcaaatactgt

SEQ ID NO: 83779 - DNA, 40 bp, Homo sapiens
acagtatttgagctccagttctatacttacgtaaaatcca

SEQ ID NO: 83780 - DNA, 40 bp, Homo sapiens
ggattttacgtaagtatagaactggagctcaaatactgtt

SEQ ID NO: 83781 - DNA, 40 bp, Homo sapiens
aacagtatttgagctccagttctatacttacgtaaaatcc

SEQ ID NO: 83782 - DNA, 40 bp, Homo sapiens
gattttacgtaagtatagaactggagctcaaatactgtta

SEQ ID NO: 83783 - DNA, 40 bp, Homo sapiens
taacagtatttgagctccagttctatacttacgtaaaatc

SEQ ID NO: 83784 - DNA, 40 bp, Homo sapiens
attttacgtaagtatagaactggagctcaaatactgttac

SEQ ID NO: 83785 - DNA, 40 bp, Homo sapiens
gtaacagtatttgagctccagttctatacttacgtaaaat

SEQ ID NO: 83786 - DNA, 40 bp, Homo sapiens
ttttacgtaagtatagaactggagctcaaatactgttact

SEQ ID NO: 83787 - DNA, 40 bp, Homo sapiens
agtaacagtatttgagctccagttctatacttacgtaaaa

SEQ ID NO: 83788 - DNA, 40 bp, Homo sapiens
tttacgtaagtatagaactggagctcaaatactgttactg

SEQ ID NO: 83789 - DNA, 40 bp, Homo sapiens
cagtaacagtatttgagctccagttctatacttacgtaaa

SEQ ID NO: 83790 - DNA, 40 bp, Homo sapiens
ttacgtaagtatagaactggagctcaaatactgttactgt

SEQ ID NO: 83791 - DNA, 40 bp, Homo sapiens
acagtaacagtatttgagctccagttctatacttacgtaa

SEQ ID NO: 83792 - DNA, 40 bp, Homo sapiens
tacgtaagtatagaactggagctcaaatactgttactgtg

SEQ ID NO: 83793 - DNA, 40 bp, Homo sapiens
cacagtaacagtatttgagctccagttctatacttacgta

SEQ ID NO: 83794 - DNA, 40 bp, Homo sapiens
acgtaagtatagaactggagctcaaatactgttactgtgt

SEQ ID NO: 83795 - DNA, 40 bp, Homo sapiens
acacagtaacagtatttgagctccagttctatacttacgt

SEQ ID NO: 83796 - DNA, 40 bp, Homo sapiens
cgtaagtatagaactggagctcaaatactgttactgtgtg

SEQ ID NO: 83797 - DNA, 40 bp, Homo sapiens
cacacagtaacagtatttgagctccagttctatacttacg

SEQ ID NO: 83798 - DNA, 40 bp, Homo sapiens
gtaagtatagaactggagctcaaatactgttactgtgtgt

SEQ ID NO: 83799 - DNA, 40 bp, Homo sapiens
acacacagtaacagtatttgagctccagttctatacttac

SEQ ID NO: 83800 - DNA, 40 bp, Homo sapiens
taagtatagaactggagctcaaatactgttactgtgtgtg

SEQ ID NO: 83801 - DNA, 40 bp, Homo sapiens
cacacacagtaacagtatttgagctccagttctatactta

SEQ ID NO: 83802 - DNA, 40 bp, Homo sapiens
aagtatagaactggagctcaaatactgttactgtgtgtga

SEQ ID NO: 83803 - DNA, 40 bp, Homo sapiens
tcacacacagtaacagtatttgagctccagttctatactt

SEQ ID NO: 83804 - DNA, 40 bp, Homo sapiens
agtatagaactggagctcaaatactgttactgtgtgtgaa

SEQ ID NO: 83805 - DNA, 40 bp, Homo sapiens
ttcacacacagtaacagtatttgagctccagttctatact

SEQ ID NO: 83806 - DNA, 40 bp, Homo sapiens
gtatagaactggagctcaaatactgttactgtgtgtgaag

SEQ ID NO: 83807 - DNA, 40 bp, Homo sapiens
cttcacacacagtaacagtatttgagctccagttctatac

SEQ ID NO: 83808 - DNA, 40 bp, Homo sapiens
tatagaactggagctcaaatactgttactgtgtgtgaaga

SEQ ID NO: 83809 - DNA, 40 bp, Homo sapiens
tcttcacacacagtaacagtatttgagctccagttctata

SEQ ID NO: 83810 - DNA, 40 bp, Homo sapiens
atagaactggagctcaaatactgttactgtgtgtgaagat

SEQ ID NO: 83811 - DNA, 40 bp, Homo sapiens
atcttcacacacagtaacagtatttgagctccagttctat

SEQ ID NO: 83812 - DNA, 40 bp, Homo sapiens
tagaactggagctcaaatactgttactgtgtgtgaagata

SEQ ID NO: 83813 - DNA, 40 bp, Homo sapiens
tatcttcacacacagtaacagtatttgagctccagttcta

SEQ ID NO: 83814 - DNA, 40 bp, Homo sapiens
agaactggagctcaaatactgttactgtgtgtgaagatat

SEQ ID NO: 83815 - DNA, 40 bp, Homo sapiens
atatcttcacacacagtaacagtatttgagctccagttct

SEQ ID NO: 83816 - DNA, 40 bp, Homo sapiens
gaactggagctcaaatactgttactgtgtgtgaagatata

SEQ ID NO: 83817 - DNA, 40 bp, Homo sapiens
tatatcttcacacacagtaacagtatttgagctccagttc

SEQ ID NO: 83818 - DNA, 40 bp, Homo sapiens
aactggagctcaaatactgttactgtgtgtgaagatatat

SEQ ID NO: 83819 - DNA, 40 bp, Homo sapiens
atatatcttcacacacagtaacagtatttgagctccagtt

SEQ ID NO: 83820 - DNA, 40 bp, Homo sapiens
actggagctcaaatactgttactgtgtgtgaagatatatg

SEQ ID NO: 83821 - DNA, 40 bp, Homo sapiens
catatatcttcacacacagtaacagtatttgagctccagt

SEQ ID NO: 83822 - DNA, 40 bp, Homo sapiens
ctggagctcaaatactgttactgtgtgtgaagatatatga

SEQ ID NO: 83823 - DNA, 40 bp, Homo sapiens
tcatatatcttcacacacagtaacagtatttgagctccag

SEQ ID NO: 83824 - DNA, 40 bp, Homo sapiens
tggagctcaaatactgttactgtgtgtgaagatatatgaa

SEQ ID NO: 83825 - DNA, 40 bp, Homo sapiens
ttcatatatcttcacacacagtaacagtatttgagctcca

SEQ ID NO: 83826 - DNA, 40 bp, Homo sapiens
ggagctcaaatactgttactgtgtgtgaagatatatgaac

SEQ ID NO: 83827 - DNA, 40 bp, Homo sapiens
gttcatatatcttcacacacagtaacagtatttgagctcc

SEQ ID NO: 83828 - DNA, 40 bp, Homo sapiens
gagctcaaatactgttactgtgtgtgaagatatatgaaca

SEQ ID NO: 83829 - DNA, 40 bp, Homo sapiens
tgttcatatatcttcacacacagtaacagtatttgagctc

SEQ ID NO: 83830 - DNA, 40 bp, Homo sapiens
agctcaaatactgttactgtgtgtgaagatatatgaacat

SEQ ID NO: 83831 - DNA, 40 bp, Homo sapiens
atgttcatatatcttcacacacagtaacagtatttgagct

SEQ ID NO: 83832 - DNA, 40 bp, Homo sapiens
gctcaaatactgttactgtgtgtgaagatatatgaacata

SEQ ID NO: 83833 - DNA, 40 bp, Homo sapiens
tatgttcatatatcttcacacacagtaacagtatttgagc

SEQ ID NO: 83834 - DNA, 40 bp, Homo sapiens
ctcaaatactgttactgtgtgtgaagatatatgaacatag

SEQ ID NO: 83835 - DNA, 40 bp, Homo sapiens
ctatgttcatatatcttcacacacagtaacagtatttgag

SEQ ID NO: 83836 - DNA, 40 bp, Homo sapiens
tcaaatactgttactgtgtgtgaagatatatgaacatagt

SEQ ID NO: 83837 - DNA, 40 bp, Homo sapiens
actatgttcatatatcttcacacacagtaacagtatttga

SEQ ID NO: 83838 - DNA, 40 bp, Homo sapiens
caaatactgttactgtgtgtgaagatatatgaacatagtt

SEQ ID NO: 83839 - DNA, 40 bp, Homo sapiens
aactatgttcatatatcttcacacacagtaacagtatttg

SEQ ID NO: 83840 - DNA, 40 bp, Homo sapiens
aaatactgttactgtgtgtgaagatatatgaacatagttt

SEQ ID NO: 83841 - DNA, 40 bp, Homo sapiens
aaactatgttcatatatcttcacacacagtaacagtattt

SEQ ID NO: 83842 - DNA, 40 bp, Homo sapiens
aatactgttactgtgtgtgaagatatatgaacatagttta

SEQ ID NO: 83843 - DNA, 40 bp, Homo sapiens
taaactatgttcatatatcttcacacacagtaacagtatt

SEQ ID NO: 83844 - DNA, 40 bp, Homo sapiens
atactgttactgtgtgtgaagatatatgaacatagtttac

SEQ ID NO: 83845 - DNA, 40 bp, Homo sapiens
gtaaactatgttcatatatcttcacacacagtaacagtat

SEQ ID NO: 83846 - DNA, 40 bp, Homo sapiens
tactgttactgtgtgtgaagatatatgaacatagtttaca

SEQ ID NO: 83847 - DNA, 40 bp, Homo sapiens
tgtaaactatgttcatatatcttcacacacagtaacagta

SEQ ID NO: 83848 - DNA, 40 bp, Homo sapiens
actgttactgtgtgtgaagatatatgaacatagtttacag

SEQ ID NO: 83849 - DNA, 40 bp, Homo sapiens
ctgtaaactatgttcatatatcttcacacacagtaacagt

SEQ ID NO: 83850 - DNA, 40 bp, Homo sapiens
ctgttactgtgtgtgaagatatatgaacatagtttacagt

SEQ ID NO: 83851 - DNA, 40 bp, Homo sapiens
actgtaaactatgttcatatatcttcacacacagtaacag

SEQ ID NO: 83852 - DNA, 40 bp, Homo sapiens
tgttactgtgtgtgaagatatatgaacatagtttacagtt

SEQ ID NO: 83853 - DNA, 40 bp, Homo sapiens
aactgtaaactatgttcatatatcttcacacacagtaaca

SEQ ID NO: 83854 - DNA, 40 bp, Homo sapiens
gttactgtgtgtgaagatatatgaacatagtttacagttg

SEQ ID NO: 83855 - DNA, 40 bp, Homo sapiens
caactgtaaactatgttcatatatcttcacacacagtaac

SEQ ID NO: 83856 - DNA, 40 bp, Homo sapiens
ttactgtgtgtgaagatatatgaacatagtttacagttgc

SEQ ID NO: 83857 - DNA, 40 bp, Homo sapiens
gcaactgtaaactatgttcatatatcttcacacacagtaa

SEQ ID NO: 83858 - DNA, 40 bp, Homo sapiens
tactgtgtgtgaagatatatgaacatagtttacagttgca

SEQ ID NO: 83859 - DNA, 40 bp, Homo sapiens
tgcaactgtaaactatgttcatatatcttcacacacagta

SEQ ID NO: 83860 - DNA, 40 bp, Homo sapiens
actgtgtgtgaagatatatgaacatagtttacagttgcat

SEQ ID NO: 83861 - DNA, 40 bp, Homo sapiens
atgcaactgtaaactatgttcatatatcttcacacacagt

SEQ ID NO: 83862 - DNA, 40 bp, Homo sapiens
ctgtgtgtgaagatatatgaacatagtttacagttgcatg

SEQ ID NO: 83863 - DNA, 40 bp, Homo sapiens
catgcaactgtaaactatgttcatatatcttcacacacag

SEQ ID NO: 83864 - DNA, 40 bp, Homo sapiens
tgtgtgtgaagatatatgaacatagtttacagttgcatgg

SEQ ID NO: 83865 - DNA, 40 bp, Homo sapiens
ccatgcaactgtaaactatgttcatatatcttcacacaca

SEQ ID NO: 83866 - DNA, 40 bp, Homo sapiens
gtgtgtgaagatatatgaacatagtttacagttgcatggc

SEQ ID NO: 83867 - DNA, 40 bp, Homo sapiens
gccatgcaactgtaaactatgttcatatatcttcacacac

SEQ ID NO: 83868 - DNA, 40 bp, Homo sapiens
tgtgtgaagatatatgaacatagtttacagttgcatggct

SEQ ID NO: 83869 - DNA, 40 bp, Homo sapiens
agccatgcaactgtaaactatgttcatatatcttcacaca

SEQ ID NO: 83870 - DNA, 40 bp, Homo sapiens
gtgtgaagatatatgaacatagtttacagttgcatggctt

SEQ ID NO: 83871 - DNA, 40 bp, Homo sapiens
aagccatgcaactgtaaactatgttcatatatcttcacac

SEQ ID NO: 83872 - DNA, 40 bp, Homo sapiens
tgtgaagatatatgaacatagtttacagttgcatggctta

SEQ ID NO: 83873 - DNA, 40 bp, Homo sapiens
taagccatgcaactgtaaactatgttcatatatcttcaca

SEQ ID NO: 83874 - DNA, 40 bp, Homo sapiens
gtgaagatatatgaacatagtttacagttgcatggcttat

SEQ ID NO: 83875 - DNA, 40 bp, Homo sapiens
ataagccatgcaactgtaaactatgttcatatatcttcac

SEQ ID NO: 83876 - DNA, 40 bp, Homo sapiens
tgaagatatatgaacatagtttacagttgcatggcttata

SEQ ID NO: 83877 - DNA, 40 bp, Homo sapiens
tataagccatgcaactgtaaactatgttcatatatcttca

SEQ ID NO: 83878 - DNA, 40 bp, Homo sapiens
gaagatatatgaacatagtttacagttgcatggcttatat

SEQ ID NO: 83879 - DNA, 40 bp, Homo sapiens
atataagccatgcaactgtaaactatgttcatatatcttc

SEQ ID NO: 83880 - DNA, 40 bp, Homo sapiens
aagatatatgaacatagtttacagttgcatggcttatatc

SEQ ID NO: 83881 - DNA, 40 bp, Homo sapiens
gatataagccatgcaactgtaaactatgttcatatatctt

SEQ ID NO: 83882 - DNA, 40 bp, Homo sapiens
agatatatgaacatagtttacagttgcatggcttatatct

SEQ ID NO: 83883 - DNA, 40 bp, Homo sapiens
agatataagccatgcaactgtaaactatgttcatatatct

SEQ ID NO: 83884 - DNA, 40 bp, Homo sapiens
gatatatgaacatagtttacagttgcatggcttatatcta

SEQ ID NO: 83885 - DNA, 40 bp, Homo sapiens
tagatataagccatgcaactgtaaactatgttcatatatc

SEQ ID NO: 83886 - DNA, 40 bp, Homo sapiens
atatatgaacatagtttacagttgcatggcttatatctaa

SEQ ID NO: 83887 - DNA, 40 bp, Homo sapiens
ttagatataagccatgcaactgtaaactatgttcatatat

SEQ ID NO: 83888 - DNA, 40 bp, Homo sapiens
tatatgaacatagtttacagttgcatggcttatatctaaa

SEQ ID NO: 83889 - DNA, 40 bp, Homo sapiens
tttagatataagccatgcaactgtaaactatgttcatata

SEQ ID NO: 83890 - DNA, 40 bp, Homo sapiens
atatgaacatagtttacagttgcatggcttatatctaaag

SEQ ID NO: 83891 - DNA, 40 bp, Homo sapiens
ctttagatataagccatgcaactgtaaactatgttcatat

SEQ ID NO: 83892 - DNA, 40 bp, Homo sapiens
tatgaacatagtttacagttgcatggcttatatctaaagt

SEQ ID NO: 83893 - DNA, 40 bp, Homo sapiens
actttagatataagccatgcaactgtaaactatgttcata

SEQ ID NO: 83894 - DNA, 40 bp, Homo sapiens
atgaacatagtttacagttgcatggcttatatctaaagtc

SEQ ID NO: 83895 - DNA, 40 bp, Homo sapiens
gactttagatataagccatgcaactgtaaactatgttcat

SEQ ID NO: 83896 - DNA, 40 bp, Homo sapiens
tgaacatagtttacagttgcatggcttatatctaaagtcc

SEQ ID NO: 83897 - DNA, 40 bp, Homo sapiens
ggactttagatataagccatgcaactgtaaactatgttca

SEQ ID NO: 83898 - DNA, 40 bp, Homo sapiens
gaacatagtttacagttgcatggcttatatctaaagtcca

SEQ ID NO: 83899 - DNA, 40 bp, Homo sapiens
tggactttagatataagccatgcaactgtaaactatgttc

SEQ ID NO: 83900 - DNA, 40 bp, Homo sapiens
aacatagtttacagttgcatggcttatatctaaagtccag

SEQ ID NO: 83901 - DNA, 40 bp, Homo sapiens
ctggactttagatataagccatgcaactgtaaactatgtt

SEQ ID NO: 83902 - DNA, 40 bp, Homo sapiens
acatagtttacagttgcatggcttatatctaaagtccaga

SEQ ID NO: 83903 - DNA, 40 bp, Homo sapiens
tctggactttagatataagccatgcaactgtaaactatgt

SEQ ID NO: 83904 - DNA, 40 bp, Homo sapiens
catagtttacagttgcatggcttatatctaaagtccagaa

SEQ ID NO: 83905 - DNA, 40 bp, Homo sapiens
ttctggactttagatataagccatgcaactgtaaactatg

SEQ ID NO: 83906 - DNA, 40 bp, Homo sapiens
atagtttacagttgcatggcttatatctaaagtccagaaa

SEQ ID NO: 83907 - DNA, 40 bp, Homo sapiens
tttctggactttagatataagccatgcaactgtaaactat

SEQ ID NO: 83908 - DNA, 40 bp, Homo sapiens
tagtttacagttgcatggcttatatctaaagtccagaaac

SEQ ID NO: 83909 - DNA, 40 bp, Homo sapiens
gtttctggactttagatataagccatgcaactgtaaacta

SEQ ID NO: 83910 - DNA, 40 bp, Homo sapiens
agtttacagttgcatggcttatatctaaagtccagaaaca

SEQ ID NO: 83911 - DNA, 40 bp, Homo sapiens
tgtttctggactttagatataagccatgcaactgtaaact

SEQ ID NO: 83912 - DNA, 40 bp, Homo sapiens
gtttacagttgcatggcttatatctaaagtccagaaacat

SEQ ID NO: 83913 - DNA, 40 bp, Homo sapiens
atgtttctggactttagatataagccatgcaactgtaaac

SEQ ID NO: 83914 - DNA, 40 bp, Homo sapiens
tttacagttgcatggcttatatctaaagtccagaaacata

SEQ ID NO: 83915 - DNA, 40 bp, Homo sapiens
tatgtttctggactttagatataagccatgcaactgtaaa

SEQ ID NO: 83916 - DNA, 40 bp, Homo sapiens
ttacagttgcatggcttatatctaaagtccagaaacataa

SEQ ID NO: 83917 - DNA, 40 bp, Homo sapiens
ttatgtttctggactttagatataagccatgcaactgtaa

SEQ ID NO: 83918 - DNA, 40 bp, Homo sapiens
tacagttgcatggcttatatctaaagtccagaaacataag

SEQ ID NO: 83919 - DNA, 40 bp, Homo sapiens
cttatgtttctggactttagatataagccatgcaactgta

SEQ ID NO: 83920 - DNA, 40 bp, Homo sapiens
acagttgcatggcttatatctaaagtccagaaacataagg

SEQ ID NO: 83921 - DNA, 40 bp, Homo sapiens
ccttatgtttctggactttagatataagccatgcaactgt

SEQ ID NO: 83922 - DNA, 40 bp, Homo sapiens
cagttgcatggcttatatctaaagtccagaaacataagga

SEQ ID NO: 83923 - DNA, 40 bp, Homo sapiens
tccttatgtttctggactttagatataagccatgcaactg

SEQ ID NO: 83924 - DNA, 40 bp, Homo sapiens
agttgcatggcttatatctaaagtccagaaacataaggac

SEQ ID NO: 83925 - DNA, 40 bp, Homo sapiens
gtccttatgtttctggactttagatataagccatgcaact

SEQ ID NO: 83926 - DNA, 40 bp, Homo sapiens
gttgcatggcttatatctaaagtccagaaacataaggaca

SEQ ID NO: 83927 - DNA, 40 bp, Homo sapiens
tgtccttatgtttctggactttagatataagccatgcaac

SEQ ID NO: 83928 - DNA, 40 bp, Homo sapiens
ttgcatggcttatatctaaagtccagaaacataaggacaa

SEQ ID NO: 83929 - DNA, 40 bp, Homo sapiens
ttgtccttatgtttctggactttagatataagccatgcaa

SEQ ID NO: 83930 - DNA, 40 bp, Homo sapiens
tgcatggcttatatctaaagtccagaaacataaggacaat

SEQ ID NO: 83931 - DNA, 40 bp, Homo sapiens
attgtccttatgtttctggactttagatataagccatgca

SEQ ID NO: 83932 - DNA, 40 bp, Homo sapiens
gcatggcttatatctaaagtccagaaacataaggacaatt

SEQ ID NO: 83933 - DNA, 40 bp, Homo sapiens
aattgtccttatgtttctggactttagatataagccatgc

SEQ ID NO: 83934 - DNA, 40 bp, Homo sapiens
catggcttatatctaaagtccagaaacataaggacaatta

SEQ ID NO: 83935 - DNA, 40 bp, Homo sapiens
taattgtccttatgtttctggactttagatataagccatg

SEQ ID NO: 83936 - DNA, 40 bp, Homo sapiens
atggcttatatctaaagtccagaaacataaggacaattaa

SEQ ID NO: 83937 - DNA, 40 bp, Homo sapiens
ttaattgtccttatgtttctggactttagatataagccat

SEQ ID NO: 83938 - DNA, 40 bp, Homo sapiens
tggcttatatctaaagtccagaaacataaggacaattaag

SEQ ID NO: 83939 - DNA, 40 bp, Homo sapiens
cttaattgtccttatgtttctggactttagatataagcca

SEQ ID NO: 83940 - DNA, 40 bp, Homo sapiens
ggcttatatctaaagtccagaaacataaggacaattaagt

SEQ ID NO: 83941 - DNA, 40 bp, Homo sapiens
acttaattgtccttatgtttctggactttagatataagcc

SEQ ID NO: 83942 - DNA, 40 bp, Homo sapiens
gcttatatctaaagtccagaaacataaggacaattaagtg

SEQ ID NO: 83943 - DNA, 40 bp, Homo sapiens
cacttaattgtccttatgtttctggactttagatataagc

SEQ ID NO: 83944 - DNA, 40 bp, Homo sapiens
cttatatctaaagtccagaaacataaggacaattaagtgt

SEQ ID NO: 83945 - DNA, 40 bp, Homo sapiens
acacttaattgtccttatgtttctggactttagatataag

SEQ ID NO: 83946 - DNA, 40 bp, Homo sapiens
ttatatctaaagtccagaaacataaggacaattaagtgta

SEQ ID NO: 83947 - DNA, 40 bp, Homo sapiens
tacacttaattgtccttatgtttctggactttagatataa

SEQ ID NO: 83948 - DNA, 40 bp, Homo sapiens
tatatctaaagtccagaaacataaggacaattaagtgtac

SEQ ID NO: 83949 - DNA, 40 bp, Homo sapiens
gtacacttaattgtccttatgtttctggactttagatata

SEQ ID NO: 83950 - DNA, 40 bp, Homo sapiens
atatctaaagtccagaaacataaggacaattaagtgtaca

SEQ ID NO: 83951 - DNA, 40 bp, Homo sapiens
tgtacacttaattgtccttatgtttctggactttagatat

SEQ ID NO: 83952 - DNA, 40 bp, Homo sapiens
tatctaaagtccagaaacataaggacaattaagtgtacac

SEQ ID NO: 83953 - DNA, 40 bp, Homo sapiens
gtgtacacttaattgtccttatgtttctggactttagata

SEQ ID NO: 83954 - DNA, 40 bp, Homo sapiens
atctaaagtccagaaacataaggacaattaagtgtacaca

SEQ ID NO: 83955 - DNA, 40 bp, Homo sapiens
tgtgtacacttaattgtccttatgtttctggactttagat

SEQ ID NO: 83956 - DNA, 40 bp, Homo sapiens
tctaaagtccagaaacataaggacaattaagtgtacacac

SEQ ID NO: 83957 - DNA, 40 bp, Homo sapiens
gtgtgtacacttaattgtccttatgtttctggactttaga

SEQ ID NO: 83958 - DNA, 40 bp, Homo sapiens
ctaaagtccagaaacataaggacaattaagtgtacacaca

SEQ ID NO: 83959 - DNA, 40 bp, Homo sapiens
tgtgtgtacacttaattgtccttatgtttctggactttag

SEQ ID NO: 83960 - DNA, 40 bp, Homo sapiens
taaagtccagaaacataaggacaattaagtgtacacacac

SEQ ID NO: 83961 - DNA, 40 bp, Homo sapiens
gtgtgtgtacacttaattgtccttatgtttctggacttta

SEQ ID NO: 83962 - DNA, 40 bp, Homo sapiens
aaagtccagaaacataaggacaattaagtgtacacacaca

SEQ ID NO: 83963 - DNA, 40 bp, Homo sapiens
tgtgtgtgtacacttaattgtccttatgtttctggacttt

SEQ ID NO: 83964 - DNA, 40 bp, Homo sapiens
aagtccagaaacataaggacaattaagtgtacacacacac

SEQ ID NO: 83965 - DNA, 40 bp, Homo sapiens
gtgtgtgtgtacacttaattgtccttatgtttctggactt

SEQ ID NO: 83966 - DNA, 40 bp, Homo sapiens
agtccagaaacataaggacaattaagtgtacacacacaca

SEQ ID NO: 83967 - DNA, 40 bp, Homo sapiens
tgtgtgtgtgtacacttaattgtccttatgtttctggact

SEQ ID NO: 83968 - DNA, 40 bp, Homo sapiens
gtccagaaacataaggacaattaagtgtacacacacacac

SEQ ID NO: 83969 - DNA, 40 bp, Homo sapiens
gtgtgtgtgtgtacacttaattgtccttatgtttctggac

SEQ ID NO: 83970 - DNA, 40 bp, Homo sapiens
tccagaaacataaggacaattaagtgtacacacacacaca

SEQ ID NO: 83971 - DNA, 40 bp, Homo sapiens
tgtgtgtgtgtgtacacttaattgtccttatgtttctgga

SEQ ID NO: 83972 - DNA, 40 bp, Homo sapiens
ccagaaacataaggacaattaagtgtacacacacacacat

SEQ ID NO: 83973 - DNA, 40 bp, Homo sapiens
atgtgtgtgtgtgtacacttaattgtccttatgtttctgg

SEQ ID NO: 83974 - DNA, 40 bp, Homo sapiens
cagaaacataaggacaattaagtgtacacacacacacatg

SEQ ID NO: 83975 - DNA, 40 bp, Homo sapiens
catgtgtgtgtgtgtacacttaattgtccttatgtttctg

SEQ ID NO: 83976 - DNA, 40 bp, Homo sapiens
agaaacataaggacaattaagtgtacacacacacacatgc

SEQ ID NO: 83977 - DNA, 40 bp, Homo sapiens
gcatgtgtgtgtgtgtacacttaattgtccttatgtttct

SEQ ID NO: 83978 - DNA, 40 bp, Homo sapiens
gaaacataaggacaattaagtgtacacacacacacatgca

SEQ ID NO: 83979 - DNA, 40 bp, Homo sapiens
tgcatgtgtgtgtgtgtacacttaattgtccttatgtttc

SEQ ID NO: 83980 - DNA, 40 bp, Homo sapiens
aaacataaggacaattaagtgtacacacacacacatgcat

SEQ ID NO: 83981 - DNA, 40 bp, Homo sapiens
atgcatgtgtgtgtgtgtacacttaattgtccttatgttt

SEQ ID NO: 83982 - DNA, 40 bp, Homo sapiens
aacataaggacaattaagtgtacacacacacacatgcatt

SEQ ID NO: 83983 - DNA, 40 bp, Homo sapiens
aatgcatgtgtgtgtgtgtacacttaattgtccttatgtt

SEQ ID NO: 83984 - DNA, 40 bp, Homo sapiens
acataaggacaattaagtgtacacacacacacatgcattt

SEQ ID NO: 83985 - DNA, 40 bp, Homo sapiens
aaatgcatgtgtgtgtgtgtacacttaattgtccttatgt

SEQ ID NO: 83986 - DNA, 40 bp, Homo sapiens
cataaggacaattaagtgtacacacacacacatgcatttg

SEQ ID NO: 83987 - DNA, 40 bp, Homo sapiens
caaatgcatgtgtgtgtgtgtacacttaattgtccttatg

SEQ ID NO: 83988 - DNA, 40 bp, Homo sapiens
ataaggacaattaagtgtacacacacacacatgcatttgg

SEQ ID NO: 83989 - DNA, 40 bp, Homo sapiens
ccaaatgcatgtgtgtgtgtgtacacttaattgtccttat

SEQ ID NO: 83990 - DNA, 40 bp, Homo sapiens
taaggacaattaagtgtacacacacacacatgcatttgga

SEQ ID NO: 83991 - DNA, 40 bp, Homo sapiens
tccaaatgcatgtgtgtgtgtgtacacttaattgtcctta

SEQ ID NO: 83992 - DNA, 40 bp, Homo sapiens
aaggacaattaagtgtacacacacacacatgcatttggat

SEQ ID NO: 83993 - DNA, 40 bp, Homo sapiens
atccaaatgcatgtgtgtgtgtgtacacttaattgtcctt

SEQ ID NO: 83994 - DNA, 40 bp, Homo sapiens
aggacaattaagtgtacacacacacacatgcatttggatt

SEQ ID NO: 83995 - DNA, 40 bp, Homo sapiens
aatccaaatgcatgtgtgtgtgtgtacacttaattgtcct

SEQ ID NO: 83996 - DNA, 40 bp, Homo sapiens
ggacaattaagtgtacacacacacacatgcatttggattt

SEQ ID NO: 83997 - DNA, 40 bp, Homo sapiens
aaatccaaatgcatgtgtgtgtgtgtacacttaattgtcc

SEQ ID NO: 83998 - DNA, 40 bp, Homo sapiens
gacaattaagtgtacacacacacacatgcatttggatttt

SEQ ID NO: 83999 - DNA, 40 bp, Homo sapiens
aaaatccaaatgcatgtgtgtgtgtgtacacttaattgtc

SEQ ID NO: 84000 - DNA, 40 bp, Homo sapiens
acaattaagtgtacacacacacacatgcatttggattttg

SEQ ID NO: 84001 - DNA, 40 bp, Homo sapiens
caaaatccaaatgcatgtgtgtgtgtgtacacttaattgt

SEQ ID NO: 84002 - DNA, 40 bp, Homo sapiens
caattaagtgtacacacacacacatgcatttggattttga

SEQ ID NO: 84003 - DNA, 40 bp, Homo sapiens
tcaaaatccaaatgcatgtgtgtgtgtgtacacttaattg

SEQ ID NO: 84004 - DNA, 40 bp, Homo sapiens
aattaagtgtacacacacacacatgcatttggattttgat

SEQ ID NO: 84005 - DNA, 40 bp, Homo sapiens
atcaaaatccaaatgcatgtgtgtgtgtgtacacttaatt

SEQ ID NO: 84006 - DNA, 40 bp, Homo sapiens
attaagtgtacacacacacacatgcatttggattttgatg

SEQ ID NO: 84007 - DNA, 40 bp, Homo sapiens
catcaaaatccaaatgcatgtgtgtgtgtgtacacttaat

SEQ ID NO: 84008 - DNA, 40 bp, Homo sapiens
ttaagtgtacacacacacacatgcatttggattttgatga

SEQ ID NO: 84009 - DNA, 40 bp, Homo sapiens
tcatcaaaatccaaatgcatgtgtgtgtgtgtacacttaa

SEQ ID NO: 84010 - DNA, 40 bp, Homo sapiens
taagtgtacacacacacacatgcatttggattttgatgac

SEQ ID NO: 84011 - DNA, 40 bp, Homo sapiens
gtcatcaaaatccaaatgcatgtgtgtgtgtgtacactta

SEQ ID NO: 84012 - DNA, 40 bp, Homo sapiens
aagtgtacacacacacacatgcatttggattttgatgact

SEQ ID NO: 84013 - DNA, 40 bp, Homo sapiens
agtcatcaaaatccaaatgcatgtgtgtgtgtgtacactt

SEQ ID NO: 84014 - DNA, 40 bp, Homo sapiens
agtgtacacacacacacatgcatttggattttgatgactt

SEQ ID NO: 84015 - DNA, 40 bp, Homo sapiens
aagtcatcaaaatccaaatgcatgtgtgtgtgtgtacact

SEQ ID NO: 84016 - DNA, 40 bp, Homo sapiens
gtgtacacacacacacatgcatttggattttgatgactta

SEQ ID NO: 84017 - DNA, 40 bp, Homo sapiens
taagtcatcaaaatccaaatgcatgtgtgtgtgtgtacac

SEQ ID NO: 84018 - DNA, 40 bp, Homo sapiens
tgtacacacacacacatgcatttggattttgatgacttag

SEQ ID NO: 84019 - DNA, 40 bp, Homo sapiens
ctaagtcatcaaaatccaaatgcatgtgtgtgtgtgtaca

SEQ ID NO: 84020 - DNA, 40 bp, Homo sapiens
gtacacacacacacatgcatttggattttgatgacttagg

SEQ ID NO: 84021 - DNA, 40 bp, Homo sapiens
cctaagtcatcaaaatccaaatgcatgtgtgtgtgtgtac

SEQ ID NO: 84022 - DNA, 40 bp, Homo sapiens
tacacacacacacatgcatttggattttgatgacttaggt

SEQ ID NO: 84023 - DNA, 40 bp, Homo sapiens
acctaagtcatcaaaatccaaatgcatgtgtgtgtgtgta

SEQ ID NO: 84024 - DNA, 40 bp, Homo sapiens
acacacacacacatgcatttggattttgatgacttaggtt

SEQ ID NO: 84025 - DNA, 40 bp, Homo sapiens
aacctaagtcatcaaaatccaaatgcatgtgtgtgtgtgt

SEQ ID NO: 84026 - DNA, 40 bp, Homo sapiens
cacacacacacatgcatttggattttgatgacttaggttt

SEQ ID NO: 84027 - DNA, 40 bp, Homo sapiens
aaacctaagtcatcaaaatccaaatgcatgtgtgtgtgtg

SEQ ID NO: 84028 - DNA, 40 bp, Homo sapiens
acacacacacatgcatttggattttgatgacttaggtttg

SEQ ID NO: 84029 - DNA, 40 bp, Homo sapiens
caaacctaagtcatcaaaatccaaatgcatgtgtgtgtgt

SEQ ID NO: 84030 - DNA, 40 bp, Homo sapiens
cacacacacatgcatttggattttgatgacttaggtttgc

SEQ ID NO: 84031 - DNA, 40 bp, Homo sapiens
gcaaacctaagtcatcaaaatccaaatgcatgtgtgtgtg

SEQ ID NO: 84032 - DNA, 40 bp, Homo sapiens
acacacacatgcatttggattttgatgacttaggtttgcc

SEQ ID NO: 84033 - DNA, 40 bp, Homo sapiens
ggcaaacctaagtcatcaaaatccaaatgcatgtgtgtgt

SEQ ID NO: 84034 - DNA, 40 bp, Homo sapiens
cacacacatgcatttggattttgatgacttaggtttgcca

SEQ ID NO: 84035 - DNA, 40 bp, Homo sapiens
tggcaaacctaagtcatcaaaatccaaatgcatgtgtgtg

SEQ ID NO: 84036 - DNA, 40 bp, Homo sapiens
acacacatgcatttggattttgatgacttaggtttgccaa

SEQ ID NO: 84037 - DNA, 40 bp, Homo sapiens
ttggcaaacctaagtcatcaaaatccaaatgcatgtgtgt

SEQ ID NO: 84038 - DNA, 40 bp, Homo sapiens
cacacatgcatttggattttgatgacttaggtttgccaat

SEQ ID NO: 84039 - DNA, 40 bp, Homo sapiens
attggcaaacctaagtcatcaaaatccaaatgcatgtgtg

SEQ ID NO: 84040 - DNA, 40 bp, Homo sapiens
acacatgcatttggattttgatgacttaggtttgccaatg

SEQ ID NO: 84041 - DNA, 40 bp, Homo sapiens
cattggcaaacctaagtcatcaaaatccaaatgcatgtgt

SEQ ID NO: 84042 - DNA, 40 bp, Homo sapiens
cacatgcatttggattttgatgacttaggtttgccaatgt

SEQ ID NO: 84043 - DNA, 40 bp, Homo sapiens
acattggcaaacctaagtcatcaaaatccaaatgcatgtg

SEQ ID NO: 84044 - DNA, 40 bp, Homo sapiens
acatgcatttggattttgatgacttaggtttgccaatgtg

SEQ ID NO: 84045 - DNA, 40 bp, Homo sapiens
cacattggcaaacctaagtcatcaaaatccaaatgcatgt

SEQ ID NO: 84046 - DNA, 40 bp, Homo sapiens
catgcatttggattttgatgacttaggtttgccaatgtgg

SEQ ID NO: 84047 - DNA, 40 bp, Homo sapiens
ccacattggcaaacctaagtcatcaaaatccaaatgcatg

SEQ ID NO: 84048 - DNA, 40 bp, Homo sapiens
atgcatttggattttgatgacttaggtttgccaatgtgga

SEQ ID NO: 84049 - DNA, 40 bp, Homo sapiens
tccacattggcaaacctaagtcatcaaaatccaaatgcat

SEQ ID NO: 84050 - DNA, 40 bp, Homo sapiens
tgcatttggattttgatgacttaggtttgccaatgtggaa

SEQ ID NO: 84051 - DNA, 40 bp, Homo sapiens
ttccacattggcaaacctaagtcatcaaaatccaaatgca

SEQ ID NO: 84052 - DNA, 40 bp, Homo sapiens
gcatttggattttgatgacttaggtttgccaatgtggaaa

SEQ ID NO: 84053 - DNA, 40 bp, Homo sapiens
tttccacattggcaaacctaagtcatcaaaatccaaatgc

SEQ ID NO: 84054 - DNA, 40 bp, Homo sapiens
catttggattttgatgacttaggtttgccaatgtggaaaa

SEQ ID NO: 84055 - DNA, 40 bp, Homo sapiens
ttttccacattggcaaacctaagtcatcaaaatccaaatg

SEQ ID NO: 84056 - DNA, 40 bp, Homo sapiens
atttggattttgatgacttaggtttgccaatgtggaaaaa

SEQ ID NO: 84057 - DNA, 40 bp, Homo sapiens
tttttccacattggcaaacctaagtcatcaaaatccaaat

SEQ ID NO: 84058 - DNA, 40 bp, Homo sapiens
tttggattttgatgacttaggtttgccaatgtggaaaaaa

SEQ ID NO: 84059 - DNA, 40 bp, Homo sapiens
ttttttccacattggcaaacctaagtcatcaaaatccaaa

SEQ ID NO: 84060 - DNA, 40 bp, Homo sapiens
ttggattttgatgacttaggtttgccaatgtggaaaaaat

SEQ ID NO: 84061 - DNA, 40 bp, Homo sapiens
attttttccacattggcaaacctaagtcatcaaaatccaa

SEQ ID NO: 84062 - DNA, 40 bp, Homo sapiens
tggattttgatgacttaggtttgccaatgtggaaaaaata

SEQ ID NO: 84063 - DNA, 40 bp, Homo sapiens
tattttttccacattggcaaacctaagtcatcaaaatcca

SEQ ID NO: 84064 - DNA, 40 bp, Homo sapiens
ggattttgatgacttaggtttgccaatgtggaaaaaatag

SEQ ID NO: 84065 - DNA, 40 bp, Homo sapiens
ctattttttccacattggcaaacctaagtcatcaaaatcc

SEQ ID NO: 84066 - DNA, 40 bp, Homo sapiens
gattttgatgacttaggtttgccaatgtggaaaaaatagt

SEQ ID NO: 84067 - DNA, 40 bp, Homo sapiens
actattttttccacattggcaaacctaagtcatcaaaatc

SEQ ID NO: 84068 - DNA, 40 bp, Homo sapiens
attttgatgacttaggtttgccaatgtggaaaaaatagta

SEQ ID NO: 84069 - DNA, 40 bp, Homo sapiens
tactattttttccacattggcaaacctaagtcatcaaaat

SEQ ID NO: 84070 - DNA, 40 bp, Homo sapiens
ttttgatgacttaggtttgccaatgtggaaaaaatagtag

SEQ ID NO: 84071 - DNA, 40 bp, Homo sapiens
ctactattttttccacattggcaaacctaagtcatcaaaa

SEQ ID NO: 84072 - DNA, 40 bp, Homo sapiens
tttgatgacttaggtttgccaatgtggaaaaaatagtagc

SEQ ID NO: 84073 - DNA, 40 bp, Homo sapiens
gctactattttttccacattggcaaacctaagtcatcaaa

SEQ ID NO: 84074 - DNA, 40 bp, Homo sapiens
ttgatgacttaggtttgccaatgtggaaaaaatagtagca

SEQ ID NO: 84075 - DNA, 40 bp, Homo sapiens
tgctactattttttccacattggcaaacctaagtcatcaa

SEQ ID NO: 84076 - DNA, 40 bp, Homo sapiens
tgatgacttaggtttgccaatgtggaaaaaatagtagcaa

SEQ ID NO: 84077 - DNA, 40 bp, Homo sapiens
ttgctactattttttccacattggcaaacctaagtcatca

SEQ ID NO: 84078 - DNA, 40 bp, Homo sapiens
gatgacttaggtttgccaatgtggaaaaaatagtagcaaa

SEQ ID NO: 84079 - DNA, 40 bp, Homo sapiens
tttgctactattttttccacattggcaaacctaagtcatc

SEQ ID NO: 84080 - DNA, 40 bp, Homo sapiens
atgacttaggtttgccaatgtggaaaaaatagtagcaaat

SEQ ID NO: 84081 - DNA, 40 bp, Homo sapiens
atttgctactattttttccacattggcaaacctaagtcat

SEQ ID NO: 84082 - DNA, 40 bp, Homo sapiens
tgacttaggtttgccaatgtggaaaaaatagtagcaaatt

SEQ ID NO: 84083 - DNA, 40 bp, Homo sapiens
aatttgctactattttttccacattggcaaacctaagtca

SEQ ID NO: 84084 - DNA, 40 bp, Homo sapiens
gacttaggtttgccaatgtggaaaaaatagtagcaaatta

SEQ ID NO: 84085 - DNA, 40 bp, Homo sapiens
taatttgctactattttttccacattggcaaacctaagtc

SEQ ID NO: 84086 - DNA, 40 bp, Homo sapiens
acttaggtttgccaatgtggaaaaaatagtagcaaattaa

SEQ ID NO: 84087 - DNA, 40 bp, Homo sapiens
ttaatttgctactattttttccacattggcaaacctaagt

SEQ ID NO: 84088 - DNA, 40 bp, Homo sapiens
cttaggtttgccaatgtggaaaaaatagtagcaaattaag

SEQ ID NO: 84089 - DNA, 40 bp, Homo sapiens
cttaatttgctactattttttccacattggcaaacctaag

SEQ ID NO: 84090 - DNA, 40 bp, Homo sapiens
ttaggtttgccaatgtggaaaaaatagtagcaaattaagt

SEQ ID NO: 84091 - DNA, 40 bp, Homo sapiens
acttaatttgctactattttttccacattggcaaacctaa

SEQ ID NO: 84092 - DNA, 40 bp, Homo sapiens
taggtttgccaatgtggaaaaaatagtagcaaattaagtt

SEQ ID NO: 84093 - DNA, 40 bp, Homo sapiens
aacttaatttgctactattttttccacattggcaaaccta

SEQ ID NO: 84094 - DNA, 40 bp, Homo sapiens
aggtttgccaatgtggaaaaaatagtagcaaattaagttc

SEQ ID NO: 84095 - DNA, 40 bp, Homo sapiens
gaacttaatttgctactattttttccacattggcaaacct

SEQ ID NO: 84096 - DNA, 40 bp, Homo sapiens
ggtttgccaatgtggaaaaaatagtagcaaattaagttct

SEQ ID NO: 84097 - DNA, 40 bp, Homo sapiens
agaacttaatttgctactattttttccacattggcaaacc

SEQ ID NO: 84098 - DNA, 40 bp, Homo sapiens
gtttgccaatgtggaaaaaatagtagcaaattaagttctc

SEQ ID NO: 84099 - DNA, 40 bp, Homo sapiens
gagaacttaatttgctactattttttccacattggcaaac

SEQ ID NO: 84100 - DNA, 40 bp, Homo sapiens
tttgccaatgtggaaaaaatagtagcaaattaagttctcc

SEQ ID NO: 84101 - DNA, 40 bp, Homo sapiens
ggagaacttaatttgctactattttttccacattggcaaa

SEQ ID NO: 84102 - DNA, 40 bp, Homo sapiens
ttgccaatgtggaaaaaatagtagcaaattaagttctcct

SEQ ID NO: 84103 - DNA, 40 bp, Homo sapiens
aggagaacttaatttgctactattttttccacattggcaa

SEQ ID NO: 84104 - DNA, 40 bp, Homo sapiens
tgccaatgtggaaaaaatagtagcaaattaagttctcctg

SEQ ID NO: 84105 - DNA, 40 bp, Homo sapiens
caggagaacttaatttgctactattttttccacattggca

SEQ ID NO: 84106 - DNA, 40 bp, Homo sapiens
gccaatgtggaaaaaatagtagcaaattaagttctcctgt

SEQ ID NO: 84107 - DNA, 40 bp, Homo sapiens
acaggagaacttaatttgctactattttttccacattggc

SEQ ID NO: 84108 - DNA, 40 bp, Homo sapiens
ccaatgtggaaaaaatagtagcaaattaagttctcctgtg

SEQ ID NO: 84109 - DNA, 40 bp, Homo sapiens
cacaggagaacttaatttgctactattttttccacattgg

SEQ ID NO: 84110 - DNA, 40 bp, Homo sapiens
caatgtggaaaaaatagtagcaaattaagttctcctgtga

SEQ ID NO: 84111 - DNA, 40 bp, Homo sapiens
tcacaggagaacttaatttgctactattttttccacattg

SEQ ID NO: 84112 - DNA, 40 bp, Homo sapiens
aatgtggaaaaaatagtagcaaattaagttctcctgtgaa

SEQ ID NO: 84113 - DNA, 40 bp, Homo sapiens
ttcacaggagaacttaatttgctactattttttccacatt

SEQ ID NO: 84114 - DNA, 40 bp, Homo sapiens
atgtggaaaaaatagtagcaaattaagttctcctgtgaaa

SEQ ID NO: 84115 - DNA, 40 bp, Homo sapiens
tttcacaggagaacttaatttgctactattttttccacat

SEQ ID NO: 84116 - DNA, 40 bp, Homo sapiens
tgtggaaaaaatagtagcaaattaagttctcctgtgaaaa

SEQ ID NO: 84117 - DNA, 40 bp, Homo sapiens
ttttcacaggagaacttaatttgctactattttttccaca

SEQ ID NO: 84118 - DNA, 40 bp, Homo sapiens
gtggaaaaaatagtagcaaattaagttctcctgtgaaaaa

SEQ ID NO: 84119 - DNA, 40 bp, Homo sapiens
tttttcacaggagaacttaatttgctactattttttccac

SEQ ID NO: 84120 - DNA, 40 bp, Homo sapiens
tggaaaaaatagtagcaaattaagttctcctgtgaaaaag

SEQ ID NO: 84121 - DNA, 40 bp, Homo sapiens
ctttttcacaggagaacttaatttgctactattttttcca

SEQ ID NO: 84122 - DNA, 40 bp, Homo sapiens
ggaaaaaatagtagcaaattaagttctcctgtgaaaaagt

SEQ ID NO: 84123 - DNA, 40 bp, Homo sapiens
actttttcacaggagaacttaatttgctactattttttcc

SEQ ID NO: 84124 - DNA, 40 bp, Homo sapiens
gaaaaaatagtagcaaattaagttctcctgtgaaaaagtc

SEQ ID NO: 84125 - DNA, 40 bp, Homo sapiens
gactttttcacaggagaacttaatttgctactattttttc

SEQ ID NO: 84126 - DNA, 40 bp, Homo sapiens
aaaaaatagtagcaaattaagttctcctgtgaaaaagtcg

SEQ ID NO: 84127 - DNA, 40 bp, Homo sapiens
cgactttttcacaggagaacttaatttgctactatttttt

SEQ ID NO: 84128 - DNA, 40 bp, Homo sapiens
aaaaatagtagcaaattaagttctcctgtgaaaaagtcgt

SEQ ID NO: 84129 - DNA, 40 bp, Homo sapiens
acgactttttcacaggagaacttaatttgctactattttt

SEQ ID NO: 84130 - DNA, 40 bp, Homo sapiens
aaaatagtagcaaattaagttctcctgtgaaaaagtcgtt

SEQ ID NO: 84131 - DNA, 40 bp, Homo sapiens
aacgactttttcacaggagaacttaatttgctactatttt

SEQ ID NO: 84132 - DNA, 40 bp, Homo sapiens
aaatagtagcaaattaagttctcctgtgaaaaagtcgtta

SEQ ID NO: 84133 - DNA, 40 bp, Homo sapiens
taacgactttttcacaggagaacttaatttgctactattt

SEQ ID NO: 84134 - DNA, 40 bp, Homo sapiens
aatagtagcaaattaagttctcctgtgaaaaagtcgttac

SEQ ID NO: 84135 - DNA, 40 bp, Homo sapiens
gtaacgactttttcacaggagaacttaatttgctactatt

SEQ ID NO: 84136 - DNA, 40 bp, Homo sapiens
atagtagcaaattaagttctcctgtgaaaaagtcgttacc

SEQ ID NO: 84137 - DNA, 40 bp, Homo sapiens
ggtaacgactttttcacaggagaacttaatttgctactat

SEQ ID NO: 84138 - DNA, 40 bp, Homo sapiens
tagtagcaaattaagttctcctgtgaaaaagtcgttacct

SEQ ID NO: 84139 - DNA, 40 bp, Homo sapiens
aggtaacgactttttcacaggagaacttaatttgctacta

SEQ ID NO: 84140 - DNA, 40 bp, Homo sapiens
agtagcaaattaagttctcctgtgaaaaagtcgttacctt

SEQ ID NO: 84141 - DNA, 40 bp, Homo sapiens
aaggtaacgactttttcacaggagaacttaatttgctact

SEQ ID NO: 84142 - DNA, 40 bp, Homo sapiens
gtagcaaattaagttctcctgtgaaaaagtcgttacctta

SEQ ID NO: 84143 - DNA, 40 bp, Homo sapiens
taaggtaacgactttttcacaggagaacttaatttgctac

SEQ ID NO: 84144 - DNA, 40 bp, Homo sapiens
tagcaaattaagttctcctgtgaaaaagtcgttaccttat

SEQ ID NO: 84145 - DNA, 40 bp, Homo sapiens
ataaggtaacgactttttcacaggagaacttaatttgcta

SEQ ID NO: 84146 - DNA, 40 bp, Homo sapiens
agcaaattaagttctcctgtgaaaaagtcgttaccttatt

SEQ ID NO: 84147 - DNA, 40 bp, Homo sapiens
aataaggtaacgactttttcacaggagaacttaatttgct

SEQ ID NO: 84148 - DNA, 40 bp, Homo sapiens
gcaaattaagttctcctgtgaaaaagtcgttaccttattt

SEQ ID NO: 84149 - DNA, 40 bp, Homo sapiens
aaataaggtaacgactttttcacaggagaacttaatttgc

SEQ ID NO: 84150 - DNA, 40 bp, Homo sapiens
caaattaagttctcctgtgaaaaagtcgttaccttattta

SEQ ID NO: 84151 - DNA, 40 bp, Homo sapiens
taaataaggtaacgactttttcacaggagaacttaatttg

SEQ ID NO: 84152 - DNA, 40 bp, Homo sapiens
aaattaagttctcctgtgaaaaagtcgttaccttatttaa

SEQ ID NO: 84153 - DNA, 40 bp, Homo sapiens
ttaaataaggtaacgactttttcacaggagaacttaattt

SEQ ID NO: 84154 - DNA, 40 bp, Homo sapiens
aattaagttctcctgtgaaaaagtcgttaccttatttaaa

SEQ ID NO: 84155 - DNA, 40 bp, Homo sapiens
tttaaataaggtaacgactttttcacaggagaacttaatt

SEQ ID NO: 84156 - DNA, 40 bp, Homo sapiens
attaagttctcctgtgaaaaagtcgttaccttatttaaaa

SEQ ID NO: 84157 - DNA, 40 bp, Homo sapiens
ttttaaataaggtaacgactttttcacaggagaacttaat

SEQ ID NO: 84158 - DNA, 40 bp, Homo sapiens
ttaagttctcctgtgaaaaagtcgttaccttatttaaaat

SEQ ID NO: 84159 - DNA, 40 bp, Homo sapiens
attttaaataaggtaacgactttttcacaggagaacttaa

SEQ ID NO: 84160 - DNA, 40 bp, Homo sapiens
taagttctcctgtgaaaaagtcgttaccttatttaaaatt

SEQ ID NO: 84161 - DNA, 40 bp, Homo sapiens
aattttaaataaggtaacgactttttcacaggagaactta

SEQ ID NO: 84162 - DNA, 40 bp, Homo sapiens
aagttctcctgtgaaaaagtcgttaccttatttaaaattc

SEQ ID NO: 84163 - DNA, 40 bp, Homo sapiens
gaattttaaataaggtaacgactttttcacaggagaactt

SEQ ID NO: 84164 - DNA, 40 bp, Homo sapiens
agttctcctgtgaaaaagtcgttaccttatttaaaattct

SEQ ID NO: 84165 - DNA, 40 bp, Homo sapiens
agaattttaaataaggtaacgactttttcacaggagaact

SEQ ID NO: 84166 - DNA, 40 bp, Homo sapiens
gttctcctgtgaaaaagtcgttaccttatttaaaattctg

SEQ ID NO: 84167 - DNA, 40 bp, Homo sapiens
cagaattttaaataaggtaacgactttttcacaggagaac

SEQ ID NO: 84168 - DNA, 40 bp, Homo sapiens
ttctcctgtgaaaaagtcgttaccttatttaaaattctgt

SEQ ID NO: 84169 - DNA, 40 bp, Homo sapiens
acagaattttaaataaggtaacgactttttcacaggagaa

SEQ ID NO: 84170 - DNA, 40 bp, Homo sapiens
tctcctgtgaaaaagtcgttaccttatttaaaattctgtg

SEQ ID NO: 84171 - DNA, 40 bp, Homo sapiens
cacagaattttaaataaggtaacgactttttcacaggaga

SEQ ID NO: 84172 - DNA, 40 bp, Homo sapiens
ctcctgtgaaaaagtcgttaccttatttaaaattctgtgc

SEQ ID NO: 84173 - DNA, 40 bp, Homo sapiens
gcacagaattttaaataaggtaacgactttttcacaggag

SEQ ID NO: 84174 - DNA, 40 bp, Homo sapiens
tcctgtgaaaaagtcgttaccttatttaaaattctgtgcc

SEQ ID NO: 84175 - DNA, 40 bp, Homo sapiens
ggcacagaattttaaataaggtaacgactttttcacagga

SEQ ID NO: 84176 - DNA, 40 bp, Homo sapiens
cctgtgaaaaagtcgttaccttatttaaaattctgtgcca

SEQ ID NO: 84177 - DNA, 40 bp, Homo sapiens
tggcacagaattttaaataaggtaacgactttttcacagg

SEQ ID NO: 84178 - DNA, 40 bp, Homo sapiens
ctgtgaaaaagtcgttaccttatttaaaattctgtgccat

SEQ ID NO: 84179 - DNA, 40 bp, Homo sapiens
atggcacagaattttaaataaggtaacgactttttcacag

SEQ ID NO: 84180 - DNA, 40 bp, Homo sapiens
tgtgaaaaagtcgttaccttatttaaaattctgtgccatt

SEQ ID NO: 84181 - DNA, 40 bp, Homo sapiens
aatggcacagaattttaaataaggtaacgactttttcaca

SEQ ID NO: 84182 - DNA, 40 bp, Homo sapiens
gtgaaaaagtcgttaccttatttaaaattctgtgccattg

SEQ ID NO: 84183 - DNA, 40 bp, Homo sapiens
caatggcacagaattttaaataaggtaacgactttttcac

SEQ ID NO: 84184 - DNA, 40 bp, Homo sapiens
tgaaaaagtcgttaccttatttaaaattctgtgccattgg

SEQ ID NO: 84185 - DNA, 40 bp, Homo sapiens
ccaatggcacagaattttaaataaggtaacgactttttca

SEQ ID NO: 84186 - DNA, 40 bp, Homo sapiens
gaaaaagtcgttaccttatttaaaattctgtgccattggt

SEQ ID NO: 84187 - DNA, 40 bp, Homo sapiens
accaatggcacagaattttaaataaggtaacgactttttc

SEQ ID NO: 84188 - DNA, 40 bp, Homo sapiens
aaaaagtcgttaccttatttaaaattctgtgccattggtt

SEQ ID NO: 84189 - DNA, 40 bp, Homo sapiens
aaccaatggcacagaattttaaataaggtaacgacttttt

SEQ ID NO: 84190 - DNA, 40 bp, Homo sapiens
aaaagtcgttaccttatttaaaattctgtgccattggtta

SEQ ID NO: 84191 - DNA, 40 bp, Homo sapiens
taaccaatggcacagaattttaaataaggtaacgactttt

SEQ ID NO: 84192 - DNA, 40 bp, Homo sapiens
aaagtcgttaccttatttaaaattctgtgccattggttat

SEQ ID NO: 84193 - DNA, 40 bp, Homo sapiens
ataaccaatggcacagaattttaaataaggtaacgacttt

SEQ ID NO: 84194 - DNA, 40 bp, Homo sapiens
aagtcgttaccttatttaaaattctgtgccattggttatc

SEQ ID NO: 84195 - DNA, 40 bp, Homo sapiens
gataaccaatggcacagaattttaaataaggtaacgactt

SEQ ID NO: 84196 - DNA, 40 bp, Homo sapiens
agtcgttaccttatttaaaattctgtgccattggttatcc

SEQ ID NO: 84197 - DNA, 40 bp, Homo sapiens
ggataaccaatggcacagaattttaaataaggtaacgact

SEQ ID NO: 84198 - DNA, 40 bp, Homo sapiens
gtcgttaccttatttaaaattctgtgccattggttatcct

SEQ ID NO: 84199 - DNA, 40 bp, Homo sapiens
aggataaccaatggcacagaattttaaataaggtaacgac

SEQ ID NO: 84200 - DNA, 40 bp, Homo sapiens
tcgttaccttatttaaaattctgtgccattggttatcctt

SEQ ID NO: 84201 - DNA, 40 bp, Homo sapiens
aaggataaccaatggcacagaattttaaataaggtaacga

SEQ ID NO: 84202 - DNA, 40 bp, Homo sapiens
cgttaccttatttaaaattctgtgccattggttatccttg

SEQ ID NO: 84203 - DNA, 40 bp, Homo sapiens
caaggataaccaatggcacagaattttaaataaggtaacg

SEQ ID NO: 84204 - DNA, 40 bp, Homo sapiens
gttaccttatttaaaattctgtgccattggttatccttgt

SEQ ID NO: 84205 - DNA, 40 bp, Homo sapiens
acaaggataaccaatggcacagaattttaaataaggtaac

SEQ ID NO: 84206 - DNA, 40 bp, Homo sapiens
ttaccttatttaaaattctgtgccattggttatccttgtc

SEQ ID NO: 84207 - DNA, 40 bp, Homo sapiens
gacaaggataaccaatggcacagaattttaaataaggtaa

SEQ ID NO: 84208 - DNA, 40 bp, Homo sapiens
taccttatttaaaattctgtgccattggttatccttgtct

SEQ ID NO: 84209 - DNA, 40 bp, Homo sapiens
agacaaggataaccaatggcacagaattttaaataaggta

SEQ ID NO: 84210 - DNA, 40 bp, Homo sapiens
accttatttaaaattctgtgccattggttatccttgtctt

SEQ ID NO: 84211 - DNA, 40 bp, Homo sapiens
aagacaaggataaccaatggcacagaattttaaataaggt

SEQ ID NO: 84212 - DNA, 40 bp, Homo sapiens
ccttatttaaaattctgtgccattggttatccttgtcttt

SEQ ID NO: 84213 - DNA, 40 bp, Homo sapiens
aaagacaaggataaccaatggcacagaattttaaataagg

SEQ ID NO: 84214 - DNA, 40 bp, Homo sapiens
cttatttaaaattctgtgccattggttatccttgtctttt

SEQ ID NO: 84215 - DNA, 40 bp, Homo sapiens
aaaagacaaggataaccaatggcacagaattttaaataag

SEQ ID NO: 84216 - DNA, 40 bp, Homo sapiens
ttatttaaaattctgtgccattggttatccttgtcttttg

SEQ ID NO: 84217 - DNA, 40 bp, Homo sapiens
caaaagacaaggataaccaatggcacagaattttaaataa

SEQ ID NO: 84218 - DNA, 40 bp, Homo sapiens
tatttaaaattctgtgccattggttatccttgtcttttgt

SEQ ID NO: 84219 - DNA, 40 bp, Homo sapiens
acaaaagacaaggataaccaatggcacagaattttaaata

SEQ ID NO: 84220 - DNA, 40 bp, Homo sapiens
atttaaaattctgtgccattggttatccttgtcttttgtg

SEQ ID NO: 84221 - DNA, 40 bp, Homo sapiens
cacaaaagacaaggataaccaatggcacagaattttaaat

SEQ ID NO: 84222 - DNA, 40 bp, Homo sapiens
tttaaaattctgtgccattggttatccttgtcttttgtga

SEQ ID NO: 84223 - DNA, 40 bp, Homo sapiens
tcacaaaagacaaggataaccaatggcacagaattttaaa

SEQ ID NO: 84224 - DNA, 40 bp, Homo sapiens
ttaaaattctgtgccattggttatccttgtcttttgtgaa

SEQ ID NO: 84225 - DNA, 40 bp, Homo sapiens
ttcacaaaagacaaggataaccaatggcacagaattttaa

SEQ ID NO: 84226 - DNA, 40 bp, Homo sapiens
taaaattctgtgccattggttatccttgtcttttgtgaaa

SEQ ID NO: 84227 - DNA, 40 bp, Homo sapiens
tttcacaaaagacaaggataaccaatggcacagaatttta

SEQ ID NO: 84228 - DNA, 40 bp, Homo sapiens
aaaattctgtgccattggttatccttgtcttttgtgaaaa

SEQ ID NO: 84229 - DNA, 40 bp, Homo sapiens
ttttcacaaaagacaaggataaccaatggcacagaatttt

SEQ ID NO: 84230 - DNA, 40 bp, Homo sapiens
aaattctgtgccattggttatccttgtcttttgtgaaaat

SEQ ID NO: 84231 - DNA, 40 bp, Homo sapiens
attttcacaaaagacaaggataaccaatggcacagaattt

SEQ ID NO: 84232 - DNA, 40 bp, Homo sapiens
aattctgtgccattggttatccttgtcttttgtgaaaatt

SEQ ID NO: 84233 - DNA, 40 bp, Homo sapiens
aattttcacaaaagacaaggataaccaatggcacagaatt

SEQ ID NO: 84234 - DNA, 40 bp, Homo sapiens
attctgtgccattggttatccttgtcttttgtgaaaatta

SEQ ID NO: 84235 - DNA, 40 bp, Homo sapiens
taattttcacaaaagacaaggataaccaatggcacagaat

SEQ ID NO: 84236 - DNA, 40 bp, Homo sapiens
ttctgtgccattggttatccttgtcttttgtgaaaattag

SEQ ID NO: 84237 - DNA, 40 bp, Homo sapiens
ctaattttcacaaaagacaaggataaccaatggcacagaa

SEQ ID NO: 84238 - DNA, 40 bp, Homo sapiens
tctgtgccattggttatccttgtcttttgtgaaaattagt

SEQ ID NO: 84239 - DNA, 40 bp, Homo sapiens
actaattttcacaaaagacaaggataaccaatggcacaga

SEQ ID NO: 84240 - DNA, 40 bp, Homo sapiens
ctgtgccattggttatccttgtcttttgtgaaaattagtg

SEQ ID NO: 84241 - DNA, 40 bp, Homo sapiens
cactaattttcacaaaagacaaggataaccaatggcacag

SEQ ID NO: 84242 - DNA, 40 bp, Homo sapiens
tgtgccattggttatccttgtcttttgtgaaaattagtgt

SEQ ID NO: 84243 - DNA, 40 bp, Homo sapiens
acactaattttcacaaaagacaaggataaccaatggcaca

SEQ ID NO: 84244 - DNA, 40 bp, Homo sapiens
gtgccattggttatccttgtcttttgtgaaaattagtgtt

SEQ ID NO: 84245 - DNA, 40 bp, Homo sapiens
aacactaattttcacaaaagacaaggataaccaatggcac

SEQ ID NO: 84246 - DNA, 40 bp, Homo sapiens
tgccattggttatccttgtcttttgtgaaaattagtgttc

SEQ ID NO: 84247 - DNA, 40 bp, Homo sapiens
gaacactaattttcacaaaagacaaggataaccaatggca

SEQ ID NO: 84248 - DNA, 40 bp, Homo sapiens
gccattggttatccttgtcttttgtgaaaattagtgttcc

SEQ ID NO: 84249 - DNA, 40 bp, Homo sapiens
ggaacactaattttcacaaaagacaaggataaccaatggc

SEQ ID NO: 84250 - DNA, 40 bp, Homo sapiens
ccattggttatccttgtcttttgtgaaaattagtgttcct

SEQ ID NO: 84251 - DNA, 40 bp, Homo sapiens
aggaacactaattttcacaaaagacaaggataaccaatgg

SEQ ID NO: 84252 - DNA, 40 bp, Homo sapiens
cattggttatccttgtcttttgtgaaaattagtgttcctg

SEQ ID NO: 84253 - DNA, 40 bp, Homo sapiens
caggaacactaattttcacaaaagacaaggataaccaatg

SEQ ID NO: 84254 - DNA, 40 bp, Homo sapiens
attggttatccttgtcttttgtgaaaattagtgttcctgt

SEQ ID NO: 84255 - DNA, 40 bp, Homo sapiens
acaggaacactaattttcacaaaagacaaggataaccaat

SEQ ID NO: 84256 - DNA, 40 bp, Homo sapiens
ttggttatccttgtcttttgtgaaaattagtgttcctgtt

SEQ ID NO: 84257 - DNA, 40 bp, Homo sapiens
aacaggaacactaattttcacaaaagacaaggataaccaa

SEQ ID NO: 84258 - DNA, 40 bp, Homo sapiens
tggttatccttgtcttttgtgaaaattagtgttcctgttt

SEQ ID NO: 84259 - DNA, 40 bp, Homo sapiens
aaacaggaacactaattttcacaaaagacaaggataacca

SEQ ID NO: 84260 - DNA, 40 bp, Homo sapiens
ggttatccttgtcttttgtgaaaattagtgttcctgttta

SEQ ID NO: 84261 - DNA, 40 bp, Homo sapiens
taaacaggaacactaattttcacaaaagacaaggataacc

SEQ ID NO: 84262 - DNA, 40 bp, Homo sapiens
gttatccttgtcttttgtgaaaattagtgttcctgtttat

SEQ ID NO: 84263 - DNA, 40 bp, Homo sapiens
ataaacaggaacactaattttcacaaaagacaaggataac

SEQ ID NO: 84264 - DNA, 40 bp, Homo sapiens
ttatccttgtcttttgtgaaaattagtgttcctgtttata

SEQ ID NO: 84265 - DNA, 40 bp, Homo sapiens
tataaacaggaacactaattttcacaaaagacaaggataa

SEQ ID NO: 84266 - DNA, 40 bp, Homo sapiens
tatccttgtcttttgtgaaaattagtgttcctgtttataa

SEQ ID NO: 84267 - DNA, 40 bp, Homo sapiens
ttataaacaggaacactaattttcacaaaagacaaggata

SEQ ID NO: 84268 - DNA, 40 bp, Homo sapiens
atccttgtcttttgtgaaaattagtgttcctgtttataat

SEQ ID NO: 84269 - DNA, 40 bp, Homo sapiens
attataaacaggaacactaattttcacaaaagacaaggat

SEQ ID NO: 84270 - DNA, 40 bp, Homo sapiens
tccttgtcttttgtgaaaattagtgttcctgtttataata

SEQ ID NO: 84271 - DNA, 40 bp, Homo sapiens
tattataaacaggaacactaattttcacaaaagacaagga

SEQ ID NO: 84272 - DNA, 40 bp, Homo sapiens
ccttgtcttttgtgaaaattagtgttcctgtttataatat

SEQ ID NO: 84273 - DNA, 40 bp, Homo sapiens
atattataaacaggaacactaattttcacaaaagacaagg

SEQ ID NO: 84274 - DNA, 40 bp, Homo sapiens
cttgtcttttgtgaaaattagtgttcctgtttataatatt

SEQ ID NO: 84275 - DNA, 40 bp, Homo sapiens
aatattataaacaggaacactaattttcacaaaagacaag

SEQ ID NO: 84276 - DNA, 40 bp, Homo sapiens
ttgtcttttgtgaaaattagtgttcctgtttataatattg

SEQ ID NO: 84277 - DNA, 40 bp, Homo sapiens
caatattataaacaggaacactaattttcacaaaagacaa

SEQ ID NO: 84278 - DNA, 40 bp, Homo sapiens
tgtcttttgtgaaaattagtgttcctgtttataatattga

SEQ ID NO: 84279 - DNA, 40 bp, Homo sapiens
tcaatattataaacaggaacactaattttcacaaaagaca

SEQ ID NO: 84280 - DNA, 40 bp, Homo sapiens
gtcttttgtgaaaattagtgttcctgtttataatattgac

SEQ ID NO: 84281 - DNA, 40 bp, Homo sapiens
gtcaatattataaacaggaacactaattttcacaaaagac

SEQ ID NO: 84282 - DNA, 40 bp, Homo sapiens
tcttttgtgaaaattagtgttcctgtttataatattgaca

SEQ ID NO: 84283 - DNA, 40 bp, Homo sapiens
tgtcaatattataaacaggaacactaattttcacaaaaga

SEQ ID NO: 84284 - DNA, 40 bp, Homo sapiens
cttttgtgaaaattagtgttcctgtttataatattgacaa

SEQ ID NO: 84285 - DNA, 40 bp, Homo sapiens
ttgtcaatattataaacaggaacactaattttcacaaaag

SEQ ID NO: 84286 - DNA, 40 bp, Homo sapiens
ttttgtgaaaattagtgttcctgtttataatattgacaaa

SEQ ID NO: 84287 - DNA, 40 bp, Homo sapiens
tttgtcaatattataaacaggaacactaattttcacaaaa

SEQ ID NO: 84288 - DNA, 40 bp, Homo sapiens
tttgtgaaaattagtgttcctgtttataatattgacaaaa

SEQ ID NO: 84289 - DNA, 40 bp, Homo sapiens
ttttgtcaatattataaacaggaacactaattttcacaaa

SEQ ID NO: 84290 - DNA, 40 bp, Homo sapiens
ttgtgaaaattagtgttcctgtttataatattgacaaaac

SEQ ID NO: 84291 - DNA, 40 bp, Homo sapiens
gttttgtcaatattataaacaggaacactaattttcacaa

SEQ ID NO: 84292 - DNA, 40 bp, Homo sapiens
tgtgaaaattagtgttcctgtttataatattgacaaaaca

SEQ ID NO: 84293 - DNA, 40 bp, Homo sapiens
tgttttgtcaatattataaacaggaacactaattttcaca

SEQ ID NO: 84294 - DNA, 40 bp, Homo sapiens
gtgaaaattagtgttcctgtttataatattgacaaaacac

SEQ ID NO: 84295 - DNA, 40 bp, Homo sapiens
gtgttttgtcaatattataaacaggaacactaattttcac

SEQ ID NO: 84296 - DNA, 40 bp, Homo sapiens
tgaaaattagtgttcctgtttataatattgacaaaacacc

SEQ ID NO: 84297 - DNA, 40 bp, Homo sapiens
ggtgttttgtcaatattataaacaggaacactaattttca

SEQ ID NO: 84298 - DNA, 40 bp, Homo sapiens
gaaaattagtgttcctgtttataatattgacaaaacacct

SEQ ID NO: 84299 - DNA, 40 bp, Homo sapiens
aggtgttttgtcaatattataaacaggaacactaattttc

SEQ ID NO: 84300 - DNA, 40 bp, Homo sapiens
aaaattagtgttcctgtttataatattgacaaaacaccta

SEQ ID NO: 84301 - DNA, 40 bp, Homo sapiens
taggtgttttgtcaatattataaacaggaacactaatttt

SEQ ID NO: 84302 - DNA, 40 bp, Homo sapiens
aaattagtgttcctgtttataatattgacaaaacacctat

SEQ ID NO: 84303 - DNA, 40 bp, Homo sapiens
ataggtgttttgtcaatattataaacaggaacactaattt

SEQ ID NO: 84304 - DNA, 40 bp, Homo sapiens
aattagtgttcctgtttataatattgacaaaacacctatg

SEQ ID NO: 84305 - DNA, 40 bp, Homo sapiens
cataggtgttttgtcaatattataaacaggaacactaatt

SEQ ID NO: 84306 - DNA, 40 bp, Homo sapiens
attagtgttcctgtttataatattgacaaaacacctatgc

SEQ ID NO: 84307 - DNA, 40 bp, Homo sapiens
gcataggtgttttgtcaatattataaacaggaacactaat

SEQ ID NO: 84308 - DNA, 40 bp, Homo sapiens
ttagtgttcctgtttataatattgacaaaacacctatgcg

SEQ ID NO: 84309 - DNA, 40 bp, Homo sapiens
cgcataggtgttttgtcaatattataaacaggaacactaa

SEQ ID NO: 84310 - DNA, 40 bp, Homo sapiens
tagtgttcctgtttataatattgacaaaacacctatgcgg

SEQ ID NO: 84311 - DNA, 40 bp, Homo sapiens
ccgcataggtgttttgtcaatattataaacaggaacacta

SEQ ID NO: 84312 - DNA, 40 bp, Homo sapiens
agtgttcctgtttataatattgacaaaacacctatgcgga

SEQ ID NO: 84313 - DNA, 40 bp, Homo sapiens
tccgcataggtgttttgtcaatattataaacaggaacact

SEQ ID NO: 84314 - DNA, 40 bp, Homo sapiens
gtgttcctgtttataatattgacaaaacacctatgcggat

SEQ ID NO: 84315 - DNA, 40 bp, Homo sapiens
atccgcataggtgttttgtcaatattataaacaggaacac

SEQ ID NO: 84316 - DNA, 40 bp, Homo sapiens
tgttcctgtttataatattgacaaaacacctatgcggatg

SEQ ID NO: 84317 - DNA, 40 bp, Homo sapiens
catccgcataggtgttttgtcaatattataaacaggaaca

SEQ ID NO: 84318 - DNA, 40 bp, Homo sapiens
gttcctgtttataatattgacaaaacacctatgcggatga

SEQ ID NO: 84319 - DNA, 40 bp, Homo sapiens
tcatccgcataggtgttttgtcaatattataaacaggaac

SEQ ID NO: 84320 - DNA, 40 bp, Homo sapiens
ttcctgtttataatattgacaaaacacctatgcggatgac

SEQ ID NO: 84321 - DNA, 40 bp, Homo sapiens
gtcatccgcataggtgttttgtcaatattataaacaggaa

SEQ ID NO: 84322 - DNA, 40 bp, Homo sapiens
tcctgtttataatattgacaaaacacctatgcggatgaca

SEQ ID NO: 84323 - DNA, 40 bp, Homo sapiens
tgtcatccgcataggtgttttgtcaatattataaacagga

SEQ ID NO: 84324 - DNA, 40 bp, Homo sapiens
cctgtttataatattgacaaaacacctatgcggatgacat

SEQ ID NO: 84325 - DNA, 40 bp, Homo sapiens
atgtcatccgcataggtgttttgtcaatattataaacagg

SEQ ID NO: 84326 - DNA, 40 bp, Homo sapiens
ctgtttataatattgacaaaacacctatgcggatgacatt

SEQ ID NO: 84327 - DNA, 40 bp, Homo sapiens
aatgtcatccgcataggtgttttgtcaatattataaacag

SEQ ID NO: 84328 - DNA, 40 bp, Homo sapiens
tgtttataatattgacaaaacacctatgcggatgacattt

SEQ ID NO: 84329 - DNA, 40 bp, Homo sapiens
aaatgtcatccgcataggtgttttgtcaatattataaaca

SEQ ID NO: 84330 - DNA, 40 bp, Homo sapiens
gtttataatattgacaaaacacctatgcggatgacattta

SEQ ID NO: 84331 - DNA, 40 bp, Homo sapiens
taaatgtcatccgcataggtgttttgtcaatattataaac

SEQ ID NO: 84332 - DNA, 40 bp, Homo sapiens
tttataatattgacaaaacacctatgcggatgacatttaa

SEQ ID NO: 84333 - DNA, 40 bp, Homo sapiens
ttaaatgtcatccgcataggtgttttgtcaatattataaa

SEQ ID NO: 84334 - DNA, 40 bp, Homo sapiens
ttataatattgacaaaacacctatgcggatgacatttaag

SEQ ID NO: 84335 - DNA, 40 bp, Homo sapiens
cttaaatgtcatccgcataggtgttttgtcaatattataa

SEQ ID NO: 84336 - DNA, 40 bp, Homo sapiens
tataatattgacaaaacacctatgcggatgacatttaaga

SEQ ID NO: 84337 - DNA, 40 bp, Homo sapiens
tcttaaatgtcatccgcataggtgttttgtcaatattata

SEQ ID NO: 84338 - DNA, 40 bp, Homo sapiens
ataatattgacaaaacacctatgcggatgacatttaagaa

SEQ ID NO: 84339 - DNA, 40 bp, Homo sapiens
ttcttaaatgtcatccgcataggtgttttgtcaatattat

SEQ ID NO: 84340 - DNA, 40 bp, Homo sapiens
taatattgacaaaacacctatgcggatgacatttaagaat

SEQ ID NO: 84341 - DNA, 40 bp, Homo sapiens
attcttaaatgtcatccgcataggtgttttgtcaatatta

SEQ ID NO: 84342 - DNA, 40 bp, Homo sapiens
aatattgacaaaacacctatgcggatgacatttaagaatt

SEQ ID NO: 84343 - DNA, 40 bp, Homo sapiens
aattcttaaatgtcatccgcataggtgttttgtcaatatt

SEQ ID NO: 84344 - DNA, 40 bp, Homo sapiens
atattgacaaaacacctatgcggatgacatttaagaattc

SEQ ID NO: 84345 - DNA, 40 bp, Homo sapiens
gaattcttaaatgtcatccgcataggtgttttgtcaatat

SEQ ID NO: 84346 - DNA, 40 bp, Homo sapiens
tattgacaaaacacctatgcggatgacatttaagaattct

SEQ ID NO: 84347 - DNA, 40 bp, Homo sapiens
agaattcttaaatgtcatccgcataggtgttttgtcaata

SEQ ID NO: 84348 - DNA, 40 bp, Homo sapiens
attgacaaaacacctatgcggatgacatttaagaattcta

SEQ ID NO: 84349 - DNA, 40 bp, Homo sapiens
tagaattcttaaatgtcatccgcataggtgttttgtcaat

SEQ ID NO: 84350 - DNA, 40 bp, Homo sapiens
ttgacaaaacacctatgcggatgacatttaagaattctaa

SEQ ID NO: 84351 - DNA, 40 bp, Homo sapiens
ttagaattcttaaatgtcatccgcataggtgttttgtcaa

SEQ ID NO: 84352 - DNA, 40 bp, Homo sapiens
tgacaaaacacctatgcggatgacatttaagaattctaaa

SEQ ID NO: 84353 - DNA, 40 bp, Homo sapiens
tttagaattcttaaatgtcatccgcataggtgttttgtca

SEQ ID NO: 84354 - DNA, 40 bp, Homo sapiens
gacaaaacacctatgcggatgacatttaagaattctaaaa

SEQ ID NO: 84355 - DNA, 40 bp, Homo sapiens
ttttagaattcttaaatgtcatccgcataggtgttttgtc

SEQ ID NO: 84356 - DNA, 40 bp, Homo sapiens
acaaaacacctatgcggatgacatttaagaattctaaaag

SEQ ID NO: 84357 - DNA, 40 bp, Homo sapiens
cttttagaattcttaaatgtcatccgcataggtgttttgt

SEQ ID NO: 84358 - DNA, 40 bp, Homo sapiens
caaaacacctatgcggatgacatttaagaattctaaaagt

SEQ ID NO: 84359 - DNA, 40 bp, Homo sapiens
acttttagaattcttaaatgtcatccgcataggtgttttg

SEQ ID NO: 84360 - DNA, 40 bp, Homo sapiens
aaaacacctatgcggatgacatttaagaattctaaaagtc

SEQ ID NO: 84361 - DNA, 40 bp, Homo sapiens
gacttttagaattcttaaatgtcatccgcataggtgtttt

SEQ ID NO: 84362 - DNA, 40 bp, Homo sapiens
aaacacctatgcggatgacatttaagaattctaaaagtcc

SEQ ID NO: 84363 - DNA, 40 bp, Homo sapiens
ggacttttagaattcttaaatgtcatccgcataggtgttt

SEQ ID NO: 84364 - DNA, 40 bp, Homo sapiens
aacacctatgcggatgacatttaagaattctaaaagtcct

SEQ ID NO: 84365 - DNA, 40 bp, Homo sapiens
aggacttttagaattcttaaatgtcatccgcataggtgtt

SEQ ID NO: 84366 - DNA, 40 bp, Homo sapiens
acacctatgcggatgacatttaagaattctaaaagtccta

SEQ ID NO: 84367 - DNA, 40 bp, Homo sapiens
taggacttttagaattcttaaatgtcatccgcataggtgt

SEQ ID NO: 84368 - DNA, 40 bp, Homo sapiens
cacctatgcggatgacatttaagaattctaaaagtcctaa

SEQ ID NO: 84369 - DNA, 40 bp, Homo sapiens
ttaggacttttagaattcttaaatgtcatccgcataggtg

SEQ ID NO: 84370 - DNA, 40 bp, Homo sapiens
acctatgcggatgacatttaagaattctaaaagtcctaat

SEQ ID NO: 84371 - DNA, 40 bp, Homo sapiens
attaggacttttagaattcttaaatgtcatccgcataggt

SEQ ID NO: 84372 - DNA, 40 bp, Homo sapiens
cctatgcggatgacatttaagaattctaaaagtcctaata

SEQ ID NO: 84373 - DNA, 40 bp, Homo sapiens
tattaggacttttagaattcttaaatgtcatccgcatagg

SEQ ID NO: 84374 - DNA, 40 bp, Homo sapiens
ctatgcggatgacatttaagaattctaaaagtcctaatat

SEQ ID NO: 84375 - DNA, 40 bp, Homo sapiens
atattaggacttttagaattcttaaatgtcatccgcatag

SEQ ID NO: 84376 - DNA, 40 bp, Homo sapiens
tatgcggatgacatttaagaattctaaaagtcctaatata

SEQ ID NO: 84377 - DNA, 40 bp, Homo sapiens
tatattaggacttttagaattcttaaatgtcatccgcata

SEQ ID NO: 84378 - DNA, 40 bp, Homo sapiens
atgcggatgacatttaagaattctaaaagtcctaatatat

SEQ ID NO: 84379 - DNA, 40 bp, Homo sapiens
atatattaggacttttagaattcttaaatgtcatccgcat

SEQ ID NO: 84380 - DNA, 40 bp, Homo sapiens
tgcggatgacatttaagaattctaaaagtcctaatatatg

SEQ ID NO: 84381 - DNA, 40 bp, Homo sapiens
catatattaggacttttagaattcttaaatgtcatccgca

SEQ ID NO: 84382 - DNA, 40 bp, Homo sapiens
gcggatgacatttaagaattctaaaagtcctaatatatgt

SEQ ID NO: 84383 - DNA, 40 bp, Homo sapiens
acatatattaggacttttagaattcttaaatgtcatccgc

SEQ ID NO: 84384 - DNA, 40 bp, Homo sapiens
cggatgacatttaagaattctaaaagtcctaatatatgta

SEQ ID NO: 84385 - DNA, 40 bp, Homo sapiens
tacatatattaggacttttagaattcttaaatgtcatccg

SEQ ID NO: 84386 - DNA, 40 bp, Homo sapiens
ggatgacatttaagaattctaaaagtcctaatatatgtaa

SEQ ID NO: 84387 - DNA, 40 bp, Homo sapiens
ttacatatattaggacttttagaattcttaaatgtcatcc

SEQ ID NO: 84388 - DNA, 40 bp, Homo sapiens
gatgacatttaagaattctaaaagtcctaatatatgtaat

SEQ ID NO: 84389 - DNA, 40 bp, Homo sapiens
attacatatattaggacttttagaattcttaaatgtcatc

SEQ ID NO: 84390 - DNA, 40 bp, Homo sapiens
atgacatttaagaattctaaaagtcctaatatatgtaata

SEQ ID NO: 84391 - DNA, 40 bp, Homo sapiens
tattacatatattaggacttttagaattcttaaatgtcat

SEQ ID NO: 84392 - DNA, 40 bp, Homo sapiens
tgacatttaagaattctaaaagtcctaatatatgtaatat

SEQ ID NO: 84393 - DNA, 40 bp, Homo sapiens
atattacatatattaggacttttagaattcttaaatgtca

SEQ ID NO: 84394 - DNA, 40 bp, Homo sapiens
gacatttaagaattctaaaagtcctaatatatgtaatata

SEQ ID NO: 84395 - DNA, 40 bp, Homo sapiens
tatattacatatattaggacttttagaattcttaaatgtc

SEQ ID NO: 84396 - DNA, 40 bp, Homo sapiens
acatttaagaattctaaaagtcctaatatatgtaatatat

SEQ ID NO: 84397 - DNA, 40 bp, Homo sapiens
atatattacatatattaggacttttagaattcttaaatgt

SEQ ID NO: 84398 - DNA, 40 bp, Homo sapiens
catttaagaattctaaaagtcctaatatatgtaatatata

SEQ ID NO: 84399 - DNA, 40 bp, Homo sapiens
tatatattacatatattaggacttttagaattcttaaatg

SEQ ID NO: 84400 - DNA, 40 bp, Homo sapiens
atttaagaattctaaaagtcctaatatatgtaatatatat

SEQ ID NO: 84401 - DNA, 40 bp, Homo sapiens
atatatattacatatattaggacttttagaattcttaaat

SEQ ID NO: 84402 - DNA, 40 bp, Homo sapiens
tttaagaattctaaaagtcctaatatatgtaatatatatt

SEQ ID NO: 84403 - DNA, 40 bp, Homo sapiens
aatatatattacatatattaggacttttagaattcttaaa

SEQ ID NO: 84404 - DNA, 40 bp, Homo sapiens
ttaagaattctaaaagtcctaatatatgtaatatatattc

SEQ ID NO: 84405 - DNA, 40 bp, Homo sapiens
gaatatatattacatatattaggacttttagaattcttaa

SEQ ID NO: 84406 - DNA, 40 bp, Homo sapiens
taagaattctaaaagtcctaatatatgtaatatatattca

SEQ ID NO: 84407 - DNA, 40 bp, Homo sapiens
tgaatatatattacatatattaggacttttagaattctta

SEQ ID NO: 84408 - DNA, 40 bp, Homo sapiens
aagaattctaaaagtcctaatatatgtaatatatattcag

SEQ ID NO: 84409 - DNA, 40 bp, Homo sapiens
ctgaatatatattacatatattaggacttttagaattctt

SEQ ID NO: 84410 - DNA, 40 bp, Homo sapiens
agaattctaaaagtcctaatatatgtaatatatattcagt

SEQ ID NO: 84411 - DNA, 40 bp, Homo sapiens
actgaatatatattacatatattaggacttttagaattct

SEQ ID NO: 84412 - DNA, 40 bp, Homo sapiens
gaattctaaaagtcctaatatatgtaatatatattcagtt

SEQ ID NO: 84413 - DNA, 40 bp, Homo sapiens
aactgaatatatattacatatattaggacttttagaattc

SEQ ID NO: 84414 - DNA, 40 bp, Homo sapiens
aattctaaaagtcctaatatatgtaatatatattcagttg

SEQ ID NO: 84415 - DNA, 40 bp, Homo sapiens
caactgaatatatattacatatattaggacttttagaatt

SEQ ID NO: 84416 - DNA, 40 bp, Homo sapiens
attctaaaagtcctaatatatgtaatatatattcagttgc

SEQ ID NO: 84417 - DNA, 40 bp, Homo sapiens
gcaactgaatatatattacatatattaggacttttagaat

SEQ ID NO: 84418 - DNA, 40 bp, Homo sapiens
ttctaaaagtcctaatatatgtaatatatattcagttgcc

SEQ ID NO: 84419 - DNA, 40 bp, Homo sapiens
ggcaactgaatatatattacatatattaggacttttagaa

SEQ ID NO: 84420 - DNA, 40 bp, Homo sapiens
tctaaaagtcctaatatatgtaatatatattcagttgcct

SEQ ID NO: 84421 - DNA, 40 bp, Homo sapiens
aggcaactgaatatatattacatatattaggacttttaga

SEQ ID NO: 84422 - DNA, 40 bp, Homo sapiens
ctaaaagtcctaatatatgtaatatatattcagttgcctg

SEQ ID NO: 84423 - DNA, 40 bp, Homo sapiens
caggcaactgaatatatattacatatattaggacttttag

SEQ ID NO: 84424 - DNA, 40 bp, Homo sapiens
taaaagtcctaatatatgtaatatatattcagttgcctga

SEQ ID NO: 84425 - DNA, 40 bp, Homo sapiens
tcaggcaactgaatatatattacatatattaggactttta

SEQ ID NO: 84426 - DNA, 40 bp, Homo sapiens
aaaagtcctaatatatgtaatatatattcagttgcctgaa

SEQ ID NO: 84427 - DNA, 40 bp, Homo sapiens
ttcaggcaactgaatatatattacatatattaggactttt

SEQ ID NO: 84428 - DNA, 40 bp, Homo sapiens
aaagtcctaatatatgtaatatatattcagttgcctgaag

SEQ ID NO: 84429 - DNA, 40 bp, Homo sapiens
cttcaggcaactgaatatatattacatatattaggacttt

SEQ ID NO: 84430 - DNA, 40 bp, Homo sapiens
aagtcctaatatatgtaatatatattcagttgcctgaaga

SEQ ID NO: 84431 - DNA, 40 bp, Homo sapiens
tcttcaggcaactgaatatatattacatatattaggactt

SEQ ID NO: 84432 - DNA, 40 bp, Homo sapiens
agtcctaatatatgtaatatatattcagttgcctgaagag

SEQ ID NO: 84433 - DNA, 40 bp, Homo sapiens
ctcttcaggcaactgaatatatattacatatattaggact

SEQ ID NO: 84434 - DNA, 40 bp, Homo sapiens
gtcctaatatatgtaatatatattcagttgcctgaagaga

SEQ ID NO: 84435 - DNA, 40 bp, Homo sapiens
tctcttcaggcaactgaatatatattacatatattaggac

SEQ ID NO: 84436 - DNA, 40 bp, Homo sapiens
tcctaatatatgtaatatatattcagttgcctgaagagaa

SEQ ID NO: 84437 - DNA, 40 bp, Homo sapiens
ttctcttcaggcaactgaatatatattacatatattagga

SEQ ID NO: 84438 - DNA, 40 bp, Homo sapiens
cctaatatatgtaatatatattcagttgcctgaagagaaa

SEQ ID NO: 84439 - DNA, 40 bp, Homo sapiens
tttctcttcaggcaactgaatatatattacatatattagg

SEQ ID NO: 84440 - DNA, 40 bp, Homo sapiens
ctaatatatgtaatatatattcagttgcctgaagagaaac

SEQ ID NO: 84441 - DNA, 40 bp, Homo sapiens
gtttctcttcaggcaactgaatatatattacatatattag

SEQ ID NO: 84442 - DNA, 40 bp, Homo sapiens
taatatatgtaatatatattcagttgcctgaagagaaaca

SEQ ID NO: 84443 - DNA, 40 bp, Homo sapiens
tgtttctcttcaggcaactgaatatatattacatatatta

SEQ ID NO: 84444 - DNA, 40 bp, Homo sapiens
aatatatgtaatatatattcagttgcctgaagagaaacat

SEQ ID NO: 84445 - DNA, 40 bp, Homo sapiens
atgtttctcttcaggcaactgaatatatattacatatatt

SEQ ID NO: 84446 - DNA, 40 bp, Homo sapiens
atatatgtaatatatattcagttgcctgaagagaaacata

SEQ ID NO: 84447 - DNA, 40 bp, Homo sapiens
tatgtttctcttcaggcaactgaatatatattacatatat

SEQ ID NO: 84448 - DNA, 40 bp, Homo sapiens
tatatgtaatatatattcagttgcctgaagagaaacataa

SEQ ID NO: 84449 - DNA, 40 bp, Homo sapiens
ttatgtttctcttcaggcaactgaatatatattacatata

SEQ ID NO: 84450 - DNA, 40 bp, Homo sapiens
atatgtaatatatattcagttgcctgaagagaaacataaa

SEQ ID NO: 84451 - DNA, 40 bp, Homo sapiens
tttatgtttctcttcaggcaactgaatatatattacatat

SEQ ID NO: 84452 - DNA, 40 bp, Homo sapiens
tatgtaatatatattcagttgcctgaagagaaacataaag

SEQ ID NO: 84453 - DNA, 40 bp, Homo sapiens
ctttatgtttctcttcaggcaactgaatatatattacata

SEQ ID NO: 84454 - DNA, 40 bp, Homo sapiens
atgtaatatatattcagttgcctgaagagaaacataaaga

SEQ ID NO: 84455 - DNA, 40 bp, Homo sapiens
tctttatgtttctcttcaggcaactgaatatatattacat

SEQ ID NO: 84456 - DNA, 40 bp, Homo sapiens
tgtaatatatattcagttgcctgaagagaaacataaagaa

SEQ ID NO: 84457 - DNA, 40 bp, Homo sapiens
ttctttatgtttctcttcaggcaactgaatatatattaca

SEQ ID NO: 84458 - DNA, 40 bp, Homo sapiens
gtaatatatattcagttgcctgaagagaaacataaagaat

SEQ ID NO: 84459 - DNA, 40 bp, Homo sapiens
attctttatgtttctcttcaggcaactgaatatatattac

SEQ ID NO: 84460 - DNA, 40 bp, Homo sapiens
taatatatattcagttgcctgaagagaaacataaagaatc

SEQ ID NO: 84461 - DNA, 40 bp, Homo sapiens
gattctttatgtttctcttcaggcaactgaatatatatta

SEQ ID NO: 84462 - DNA, 40 bp, Homo sapiens
aatatatattcagttgcctgaagagaaacataaagaatcc

SEQ ID NO: 84463 - DNA, 40 bp, Homo sapiens
ggattctttatgtttctcttcaggcaactgaatatatatt

SEQ ID NO: 84464 - DNA, 40 bp, Homo sapiens
atatatattcagttgcctgaagagaaacataaagaatcct

SEQ ID NO: 84465 - DNA, 40 bp, Homo sapiens
aggattctttatgtttctcttcaggcaactgaatatatat

SEQ ID NO: 84466 - DNA, 40 bp, Homo sapiens
tatatattcagttgcctgaagagaaacataaagaatcctt

SEQ ID NO: 84467 - DNA, 40 bp, Homo sapiens
aaggattctttatgtttctcttcaggcaactgaatatata

SEQ ID NO: 84468 - DNA, 40 bp, Homo sapiens
atatattcagttgcctgaagagaaacataaagaatccttt

SEQ ID NO: 84469 - DNA, 40 bp, Homo sapiens
aaaggattctttatgtttctcttcaggcaactgaatatat

SEQ ID NO: 84470 - DNA, 40 bp, Homo sapiens
tatattcagttgcctgaagagaaacataaagaatcctttc

SEQ ID NO: 84471 - DNA, 40 bp, Homo sapiens
gaaaggattctttatgtttctcttcaggcaactgaatata

SEQ ID NO: 84472 - DNA, 40 bp, Homo sapiens
atattcagttgcctgaagagaaacataaagaatcctttct

SEQ ID NO: 84473 - DNA, 40 bp, Homo sapiens
agaaaggattctttatgtttctcttcaggcaactgaatat

SEQ ID NO: 84474 - DNA, 40 bp, Homo sapiens
tattcagttgcctgaagagaaacataaagaatcctttctt

SEQ ID NO: 84475 - DNA, 40 bp, Homo sapiens
aagaaaggattctttatgtttctcttcaggcaactgaata

SEQ ID NO: 84476 - DNA, 40 bp, Homo sapiens
attcagttgcctgaagagaaacataaagaatcctttctta

SEQ ID NO: 84477 - DNA, 40 bp, Homo sapiens
taagaaaggattctttatgtttctcttcaggcaactgaat

SEQ ID NO: 84478 - DNA, 40 bp, Homo sapiens
ttcagttgcctgaagagaaacataaagaatcctttcttaa

SEQ ID NO: 84479 - DNA, 40 bp, Homo sapiens
ttaagaaaggattctttatgtttctcttcaggcaactgaa

SEQ ID NO: 84480 - DNA, 40 bp, Homo sapiens
tcagttgcctgaagagaaacataaagaatcctttcttaat

SEQ ID NO: 84481 - DNA, 40 bp, Homo sapiens
attaagaaaggattctttatgtttctcttcaggcaactga

SEQ ID NO: 84482 - DNA, 40 bp, Homo sapiens
cagttgcctgaagagaaacataaagaatcctttcttaata

SEQ ID NO: 84483 - DNA, 40 bp, Homo sapiens
tattaagaaaggattctttatgtttctcttcaggcaactg

SEQ ID NO: 84484 - DNA, 40 bp, Homo sapiens
agttgcctgaagagaaacataaagaatcctttcttaatat

SEQ ID NO: 84485 - DNA, 40 bp, Homo sapiens
atattaagaaaggattctttatgtttctcttcaggcaact

SEQ ID NO: 84486 - DNA, 40 bp, Homo sapiens
gttgcctgaagagaaacataaagaatcctttcttaatatt

SEQ ID NO: 84487 - DNA, 40 bp, Homo sapiens
aatattaagaaaggattctttatgtttctcttcaggcaac

SEQ ID NO: 84488 - DNA, 40 bp, Homo sapiens
ttgcctgaagagaaacataaagaatcctttcttaatattt

SEQ ID NO: 84489 - DNA, 40 bp, Homo sapiens
aaatattaagaaaggattctttatgtttctcttcaggcaa

SEQ ID NO: 84490 - DNA, 40 bp, Homo sapiens
tgcctgaagagaaacataaagaatcctttcttaatatttt

SEQ ID NO: 84491 - DNA, 40 bp, Homo sapiens
aaaatattaagaaaggattctttatgtttctcttcaggca

SEQ ID NO: 84492 - DNA, 40 bp, Homo sapiens
gcctgaagagaaacataaagaatcctttcttaatattttt

SEQ ID NO: 84493 - DNA, 40 bp, Homo sapiens
aaaaatattaagaaaggattctttatgtttctcttcaggc

SEQ ID NO: 84494 - DNA, 40 bp, Homo sapiens
cctgaagagaaacataaagaatcctttcttaatatttttt

SEQ ID NO: 84495 - DNA, 40 bp, Homo sapiens
aaaaaatattaagaaaggattctttatgtttctcttcagg

SEQ ID NO: 84496 - DNA, 40 bp, Homo sapiens
ctgaagagaaacataaagaatcctttcttaatattttttc

SEQ ID NO: 84497 - DNA, 40 bp, Homo sapiens
gaaaaaatattaagaaaggattctttatgtttctcttcag

SEQ ID NO: 84498 - DNA, 40 bp, Homo sapiens
tgaagagaaacataaagaatcctttcttaatattttttcc

SEQ ID NO: 84499 - DNA, 40 bp, Homo sapiens
ggaaaaaatattaagaaaggattctttatgtttctcttca

SEQ ID NO: 84500 - DNA, 40 bp, Homo sapiens
gaagagaaacataaagaatcctttcttaatattttttcca

SEQ ID NO: 84501 - DNA, 40 bp, Homo sapiens
tggaaaaaatattaagaaaggattctttatgtttctcttc

SEQ ID NO: 84502 - DNA, 40 bp, Homo sapiens
aagagaaacataaagaatcctttcttaatattttttccat

SEQ ID NO: 84503 - DNA, 40 bp, Homo sapiens
atggaaaaaatattaagaaaggattctttatgtttctctt

SEQ ID NO: 84504 - DNA, 40 bp, Homo sapiens
agagaaacataaagaatcctttcttaatattttttccatt

SEQ ID NO: 84505 - DNA, 40 bp, Homo sapiens
aatggaaaaaatattaagaaaggattctttatgtttctct

SEQ ID NO: 84506 - DNA, 40 bp, Homo sapiens
gagaaacataaagaatcctttcttaatattttttccatta

SEQ ID NO: 84507 - DNA, 40 bp, Homo sapiens
taatggaaaaaatattaagaaaggattctttatgtttctc

SEQ ID NO: 84508 - DNA, 40 bp, Homo sapiens
agaaacataaagaatcctttcttaatattttttccattaa

SEQ ID NO: 84509 - DNA, 40 bp, Homo sapiens
ttaatggaaaaaatattaagaaaggattctttatgtttct

SEQ ID NO: 84510 - DNA, 40 bp, Homo sapiens
gaaacataaagaatcctttcttaatattttttccattaat

SEQ ID NO: 84511 - DNA, 40 bp, Homo sapiens
attaatggaaaaaatattaagaaaggattctttatgtttc

SEQ ID NO: 84512 - DNA, 40 bp, Homo sapiens
aaacataaagaatcctttcttaatattttttccattaatg

SEQ ID NO: 84513 - DNA, 40 bp, Homo sapiens
cattaatggaaaaaatattaagaaaggattctttatgttt

SEQ ID NO: 84514 - DNA, 40 bp, Homo sapiens
aacataaagaatcctttcttaatattttttccattaatga

SEQ ID NO: 84515 - DNA, 40 bp, Homo sapiens
tcattaatggaaaaaatattaagaaaggattctttatgtt

SEQ ID NO: 84516 - DNA, 40 bp, Homo sapiens
acataaagaatcctttcttaatattttttccattaatgaa

SEQ ID NO: 84517 - DNA, 40 bp, Homo sapiens
ttcattaatggaaaaaatattaagaaaggattctttatgt

SEQ ID NO: 84518 - DNA, 40 bp, Homo sapiens
cataaagaatcctttcttaatattttttccattaatgaaa

SEQ ID NO: 84519 - DNA, 40 bp, Homo sapiens
tttcattaatggaaaaaatattaagaaaggattctttatg

SEQ ID NO: 84520 - DNA, 40 bp, Homo sapiens
ataaagaatcctttcttaatattttttccattaatgaaat

SEQ ID NO: 84521 - DNA, 40 bp, Homo sapiens
atttcattaatggaaaaaatattaagaaaggattctttat

SEQ ID NO: 84522 - DNA, 40 bp, Homo sapiens
taaagaatcctttcttaatattttttccattaatgaaatt

SEQ ID NO: 84523 - DNA, 40 bp, Homo sapiens
aatttcattaatggaaaaaatattaagaaaggattcttta

SEQ ID NO: 84524 - DNA, 40 bp, Homo sapiens
aaagaatcctttcttaatattttttccattaatgaaattt

SEQ ID NO: 84525 - DNA, 40 bp, Homo sapiens
aaatttcattaatggaaaaaatattaagaaaggattcttt

SEQ ID NO: 84526 - DNA, 40 bp, Homo sapiens
aagaatcctttcttaatattttttccattaatgaaatttg

SEQ ID NO: 84527 - DNA, 40 bp, Homo sapiens
caaatttcattaatggaaaaaatattaagaaaggattctt

SEQ ID NO: 84528 - DNA, 40 bp, Homo sapiens
agaatcctttcttaatattttttccattaatgaaatttgt

SEQ ID NO: 84529 - DNA, 40 bp, Homo sapiens
acaaatttcattaatggaaaaaatattaagaaaggattct

SEQ ID NO: 84530 - DNA, 40 bp, Homo sapiens
gaatcctttcttaatattttttccattaatgaaatttgtt

SEQ ID NO: 84531 - DNA, 40 bp, Homo sapiens
aacaaatttcattaatggaaaaaatattaagaaaggattc

SEQ ID NO: 84532 - DNA, 40 bp, Homo sapiens
aatcctttcttaatattttttccattaatgaaatttgtta

SEQ ID NO: 84533 - DNA, 40 bp, Homo sapiens
taacaaatttcattaatggaaaaaatattaagaaaggatt

SEQ ID NO: 84534 - DNA, 40 bp, Homo sapiens
atcctttcttaatattttttccattaatgaaatttgttac

SEQ ID NO: 84535 - DNA, 40 bp, Homo sapiens
gtaacaaatttcattaatggaaaaaatattaagaaaggat

SEQ ID NO: 84536 - DNA, 40 bp, Homo sapiens
tcctttcttaatattttttccattaatgaaatttgttacc

SEQ ID NO: 84537 - DNA, 40 bp, Homo sapiens
ggtaacaaatttcattaatggaaaaaatattaagaaagga

SEQ ID NO: 84538 - DNA, 40 bp, Homo sapiens
cctttcttaatattttttccattaatgaaatttgttacct

SEQ ID NO: 84539 - DNA, 40 bp, Homo sapiens
aggtaacaaatttcattaatggaaaaaatattaagaaagg

SEQ ID NO: 84540 - DNA, 40 bp, Homo sapiens
ctttcttaatattttttccattaatgaaatttgttacctg

SEQ ID NO: 84541 - DNA, 40 bp, Homo sapiens
caggtaacaaatttcattaatggaaaaaatattaagaaag

SEQ ID NO: 84542 - DNA, 40 bp, Homo sapiens
tttcttaatattttttccattaatgaaatttgttacctgt

SEQ ID NO: 84543 - DNA, 40 bp, Homo sapiens
acaggtaacaaatttcattaatggaaaaaatattaagaaa

SEQ ID NO: 84544 - DNA, 40 bp, Homo sapiens
ttcttaatattttttccattaatgaaatttgttacctgta

SEQ ID NO: 84545 - DNA, 40 bp, Homo sapiens
tacaggtaacaaatttcattaatggaaaaaatattaagaa

SEQ ID NO: 84546 - DNA, 40 bp, Homo sapiens
tcttaatattttttccattaatgaaatttgttacctgtac

SEQ ID NO: 84547 - DNA, 40 bp, Homo sapiens
gtacaggtaacaaatttcattaatggaaaaaatattaaga

SEQ ID NO: 84548 - DNA, 40 bp, Homo sapiens
cttaatattttttccattaatgaaatttgttacctgtaca

SEQ ID NO: 84549 - DNA, 40 bp, Homo sapiens
tgtacaggtaacaaatttcattaatggaaaaaatattaag

SEQ ID NO: 84550 - DNA, 40 bp, Homo sapiens
ttaatattttttccattaatgaaatttgttacctgtacac

SEQ ID NO: 84551 - DNA, 40 bp, Homo sapiens
gtgtacaggtaacaaatttcattaatggaaaaaatattaa

SEQ ID NO: 84552 - DNA, 40 bp, Homo sapiens
taatattttttccattaatgaaatttgttacctgtacaca

SEQ ID NO: 84553 - DNA, 40 bp, Homo sapiens
tgtgtacaggtaacaaatttcattaatggaaaaaatatta

SEQ ID NO: 84554 - DNA, 40 bp, Homo sapiens
aatattttttccattaatgaaatttgttacctgtacacat

SEQ ID NO: 84555 - DNA, 40 bp, Homo sapiens
atgtgtacaggtaacaaatttcattaatggaaaaaatatt

SEQ ID NO: 84556 - DNA, 40 bp, Homo sapiens
atattttttccattaatgaaatttgttacctgtacacatg

SEQ ID NO: 84557 - DNA, 40 bp, Homo sapiens
catgtgtacaggtaacaaatttcattaatggaaaaaatat

SEQ ID NO: 84558 - DNA, 40 bp, Homo sapiens
tattttttccattaatgaaatttgttacctgtacacatga

SEQ ID NO: 84559 - DNA, 40 bp, Homo sapiens
tcatgtgtacaggtaacaaatttcattaatggaaaaaata

SEQ ID NO: 84560 - DNA, 40 bp, Homo sapiens
attttttccattaatgaaatttgttacctgtacacatgaa

SEQ ID NO: 84561 - DNA, 40 bp, Homo sapiens
ttcatgtgtacaggtaacaaatttcattaatggaaaaaat

SEQ ID NO: 84562 - DNA, 40 bp, Homo sapiens
ttttttccattaatgaaatttgttacctgtacacatgaag

SEQ ID NO: 84563 - DNA, 40 bp, Homo sapiens
cttcatgtgtacaggtaacaaatttcattaatggaaaaaa

SEQ ID NO: 84564 - DNA, 40 bp, Homo sapiens
tttttccattaatgaaatttgttacctgtacacatgaagc

SEQ ID NO: 84565 - DNA, 40 bp, Homo sapiens
gcttcatgtgtacaggtaacaaatttcattaatggaaaaa

SEQ ID NO: 84566 - DNA, 40 bp, Homo sapiens
ttttccattaatgaaatttgttacctgtacacatgaagcc

SEQ ID NO: 84567 - DNA, 40 bp, Homo sapiens
ggcttcatgtgtacaggtaacaaatttcattaatggaaaa

SEQ ID NO: 84568 - DNA, 40 bp, Homo sapiens
tttccattaatgaaatttgttacctgtacacatgaagcca

SEQ ID NO: 84569 - DNA, 40 bp, Homo sapiens
tggcttcatgtgtacaggtaacaaatttcattaatggaaa

SEQ ID NO: 84570 - DNA, 40 bp, Homo sapiens
ttccattaatgaaatttgttacctgtacacatgaagccat

SEQ ID NO: 84571 - DNA, 40 bp, Homo sapiens
atggcttcatgtgtacaggtaacaaatttcattaatggaa

SEQ ID NO: 84572 - DNA, 40 bp, Homo sapiens
tccattaatgaaatttgttacctgtacacatgaagccatc

SEQ ID NO: 84573 - DNA, 40 bp, Homo sapiens
gatggcttcatgtgtacaggtaacaaatttcattaatgga

SEQ ID NO: 84574 - DNA, 40 bp, Homo sapiens
ccattaatgaaatttgttacctgtacacatgaagccatcg

SEQ ID NO: 84575 - DNA, 40 bp, Homo sapiens
cgatggcttcatgtgtacaggtaacaaatttcattaatgg

SEQ ID NO: 84576 - DNA, 40 bp, Homo sapiens
cattaatgaaatttgttacctgtacacatgaagccatcgt

SEQ ID NO: 84577 - DNA, 40 bp, Homo sapiens
acgatggcttcatgtgtacaggtaacaaatttcattaatg

SEQ ID NO: 84578 - DNA, 40 bp, Homo sapiens
attaatgaaatttgttacctgtacacatgaagccatcgta

SEQ ID NO: 84579 - DNA, 40 bp, Homo sapiens
tacgatggcttcatgtgtacaggtaacaaatttcattaat

SEQ ID NO: 84580 - DNA, 40 bp, Homo sapiens
ttaatgaaatttgttacctgtacacatgaagccatcgtat

SEQ ID NO: 84581 - DNA, 40 bp, Homo sapiens
atacgatggcttcatgtgtacaggtaacaaatttcattaa

SEQ ID NO: 84582 - DNA, 40 bp, Homo sapiens
taatgaaatttgttacctgtacacatgaagccatcgtata

SEQ ID NO: 84583 - DNA, 40 bp, Homo sapiens
tatacgatggcttcatgtgtacaggtaacaaatttcatta

SEQ ID NO: 84584 - DNA, 40 bp, Homo sapiens
aatgaaatttgttacctgtacacatgaagccatcgtatat

SEQ ID NO: 84585 - DNA, 40 bp, Homo sapiens
atatacgatggcttcatgtgtacaggtaacaaatttcatt

SEQ ID NO: 84586 - DNA, 40 bp, Homo sapiens
atgaaatttgttacctgtacacatgaagccatcgtatata

SEQ ID NO: 84587 - DNA, 40 bp, Homo sapiens
tatatacgatggcttcatgtgtacaggtaacaaatttcat

SEQ ID NO: 84588 - DNA, 40 bp, Homo sapiens
tgaaatttgttacctgtacacatgaagccatcgtatatat

SEQ ID NO: 84589 - DNA, 40 bp, Homo sapiens
atatatacgatggcttcatgtgtacaggtaacaaatttca

SEQ ID NO: 84590 - DNA, 40 bp, Homo sapiens
gaaatttgttacctgtacacatgaagccatcgtatatatt

SEQ ID NO: 84591 - DNA, 40 bp, Homo sapiens
aatatatacgatggcttcatgtgtacaggtaacaaatttc

SEQ ID NO: 84592 - DNA, 40 bp, Homo sapiens
aaatttgttacctgtacacatgaagccatcgtatatattc

SEQ ID NO: 84593 - DNA, 40 bp, Homo sapiens
gaatatatacgatggcttcatgtgtacaggtaacaaattt

SEQ ID NO: 84594 - DNA, 40 bp, Homo sapiens
aatttgttacctgtacacatgaagccatcgtatatattca

SEQ ID NO: 84595 - DNA, 40 bp, Homo sapiens
tgaatatatacgatggcttcatgtgtacaggtaacaaatt

SEQ ID NO: 84596 - DNA, 40 bp, Homo sapiens
atttgttacctgtacacatgaagccatcgtatatattcac

SEQ ID NO: 84597 - DNA, 40 bp, Homo sapiens
gtgaatatatacgatggcttcatgtgtacaggtaacaaat

SEQ ID NO: 84598 - DNA, 40 bp, Homo sapiens
tttgttacctgtacacatgaagccatcgtatatattcaca

SEQ ID NO: 84599 - DNA, 40 bp, Homo sapiens
tgtgaatatatacgatggcttcatgtgtacaggtaacaaa

SEQ ID NO: 84600 - DNA, 40 bp, Homo sapiens
ttgttacctgtacacatgaagccatcgtatatattcacat

SEQ ID NO: 84601 - DNA, 40 bp, Homo sapiens
atgtgaatatatacgatggcttcatgtgtacaggtaacaa

SEQ ID NO: 84602 - DNA, 40 bp, Homo sapiens
tgttacctgtacacatgaagccatcgtatatattcacatt

SEQ ID NO: 84603 - DNA, 40 bp, Homo sapiens
aatgtgaatatatacgatggcttcatgtgtacaggtaaca

SEQ ID NO: 84604 - DNA, 40 bp, Homo sapiens
gttacctgtacacatgaagccatcgtatatattcacattt

SEQ ID NO: 84605 - DNA, 40 bp, Homo sapiens
aaatgtgaatatatacgatggcttcatgtgtacaggtaac

SEQ ID NO: 84606 - DNA, 40 bp, Homo sapiens
ttacctgtacacatgaagccatcgtatatattcacatttt

SEQ ID NO: 84607 - DNA, 40 bp, Homo sapiens
aaaatgtgaatatatacgatggcttcatgtgtacaggtaa

SEQ ID NO: 84608 - DNA, 40 bp, Homo sapiens
tacctgtacacatgaagccatcgtatatattcacatttta

SEQ ID NO: 84609 - DNA, 40 bp, Homo sapiens
taaaatgtgaatatatacgatggcttcatgtgtacaggta

SEQ ID NO: 84610 - DNA, 40 bp, Homo sapiens
acctgtacacatgaagccatcgtatatattcacattttaa

SEQ ID NO: 84611 - DNA, 40 bp, Homo sapiens
ttaaaatgtgaatatatacgatggcttcatgtgtacaggt

SEQ ID NO: 84612 - DNA, 40 bp, Homo sapiens
cctgtacacatgaagccatcgtatatattcacattttaat

SEQ ID NO: 84613 - DNA, 40 bp, Homo sapiens
attaaaatgtgaatatatacgatggcttcatgtgtacagg

SEQ ID NO: 84614 - DNA, 40 bp, Homo sapiens
ctgtacacatgaagccatcgtatatattcacattttaata

SEQ ID NO: 84615 - DNA, 40 bp, Homo sapiens
tattaaaatgtgaatatatacgatggcttcatgtgtacag

SEQ ID NO: 84616 - DNA, 40 bp, Homo sapiens
tgtacacatgaagccatcgtatatattcacattttaatac

SEQ ID NO: 84617 - DNA, 40 bp, Homo sapiens
gtattaaaatgtgaatatatacgatggcttcatgtgtaca

SEQ ID NO: 84618 - DNA, 40 bp, Homo sapiens
gtacacatgaagccatcgtatatattcacattttaatact

SEQ ID NO: 84619 - DNA, 40 bp, Homo sapiens
agtattaaaatgtgaatatatacgatggcttcatgtgtac

SEQ ID NO: 84620 - DNA, 40 bp, Homo sapiens
tacacatgaagccatcgtatatattcacattttaatactt

SEQ ID NO: 84621 - DNA, 40 bp, Homo sapiens
aagtattaaaatgtgaatatatacgatggcttcatgtgta

SEQ ID NO: 84622 - DNA, 40 bp, Homo sapiens
acacatgaagccatcgtatatattcacattttaatacttt

SEQ ID NO: 84623 - DNA, 40 bp, Homo sapiens
aaagtattaaaatgtgaatatatacgatggcttcatgtgt

SEQ ID NO: 84624 - DNA, 40 bp, Homo sapiens
cacatgaagccatcgtatatattcacattttaatactttt

SEQ ID NO: 84625 - DNA, 40 bp, Homo sapiens
aaaagtattaaaatgtgaatatatacgatggcttcatgtg

SEQ ID NO: 84626 - DNA, 40 bp, Homo sapiens
acatgaagccatcgtatatattcacattttaatacttttt

SEQ ID NO: 84627 - DNA, 40 bp, Homo sapiens
aaaaagtattaaaatgtgaatatatacgatggcttcatgt

SEQ ID NO: 84628 - DNA, 40 bp, Homo sapiens
catgaagccatcgtatatattcacattttaatacttttta

SEQ ID NO: 84629 - DNA, 40 bp, Homo sapiens
taaaaagtattaaaatgtgaatatatacgatggcttcatg

SEQ ID NO: 84630 - DNA, 40 bp, Homo sapiens
atgaagccatcgtatatattcacattttaatactttttat

SEQ ID NO: 84631 - DNA, 40 bp, Homo sapiens
ataaaaagtattaaaatgtgaatatatacgatggcttcat

SEQ ID NO: 84632 - DNA, 40 bp, Homo sapiens
tgaagccatcgtatatattcacattttaatactttttatg

SEQ ID NO: 84633 - DNA, 40 bp, Homo sapiens
cataaaaagtattaaaatgtgaatatatacgatggcttca

SEQ ID NO: 84634 - DNA, 40 bp, Homo sapiens
gaagccatcgtatatattcacattttaatactttttatgt

SEQ ID NO: 84635 - DNA, 40 bp, Homo sapiens
acataaaaagtattaaaatgtgaatatatacgatggcttc

SEQ ID NO: 84636 - DNA, 40 bp, Homo sapiens
aagccatcgtatatattcacattttaatactttttatgta

SEQ ID NO: 84637 - DNA, 40 bp, Homo sapiens
tacataaaaagtattaaaatgtgaatatatacgatggctt

SEQ ID NO: 84638 - DNA, 40 bp, Homo sapiens
agccatcgtatatattcacattttaatactttttatgtat

SEQ ID NO: 84639 - DNA, 40 bp, Homo sapiens
atacataaaaagtattaaaatgtgaatatatacgatggct

SEQ ID NO: 84640 - DNA, 40 bp, Homo sapiens
gccatcgtatatattcacattttaatactttttatgtatt

SEQ ID NO: 84641 - DNA, 40 bp, Homo sapiens
aatacataaaaagtattaaaatgtgaatatatacgatggc

SEQ ID NO: 84642 - DNA, 40 bp, Homo sapiens
ccatcgtatatattcacattttaatactttttatgtattt

SEQ ID NO: 84643 - DNA, 40 bp, Homo sapiens
aaatacataaaaagtattaaaatgtgaatatatacgatgg

SEQ ID NO: 84644 - DNA, 40 bp, Homo sapiens
catcgtatatattcacattttaatactttttatgtatttc

SEQ ID NO: 84645 - DNA, 40 bp, Homo sapiens
gaaatacataaaaagtattaaaatgtgaatatatacgatg

SEQ ID NO: 84646 - DNA, 40 bp, Homo sapiens
atcgtatatattcacattttaatactttttatgtatttca

SEQ ID NO: 84647 - DNA, 40 bp, Homo sapiens
tgaaatacataaaaagtattaaaatgtgaatatatacgat

SEQ ID NO: 84648 - DNA, 40 bp, Homo sapiens
tcgtatatattcacattttaatactttttatgtatttcag

SEQ ID NO: 84649 - DNA, 40 bp, Homo sapiens
ctgaaatacataaaaagtattaaaatgtgaatatatacga

SEQ ID NO: 84650 - DNA, 40 bp, Homo sapiens
cgtatatattcacattttaatactttttatgtatttcagg

SEQ ID NO: 84651 - DNA, 40 bp, Homo sapiens
cctgaaatacataaaaagtattaaaatgtgaatatatacg

SEQ ID NO: 84652 - DNA, 40 bp, Homo sapiens
gtatatattcacattttaatactttttatgtatttcaggg

SEQ ID NO: 84653 - DNA, 40 bp, Homo sapiens
ccctgaaatacataaaaagtattaaaatgtgaatatatac

SEQ ID NO: 84654 - DNA, 40 bp, Homo sapiens
tatatattcacattttaatactttttatgtatttcagggt

SEQ ID NO: 84655 - DNA, 40 bp, Homo sapiens
accctgaaatacataaaaagtattaaaatgtgaatatata

SEQ ID NO: 84656 - DNA, 40 bp, Homo sapiens
atatattcacattttaatactttttatgtatttcagggtg

SEQ ID NO: 84657 - DNA, 40 bp, Homo sapiens
caccctgaaatacataaaaagtattaaaatgtgaatatat

SEQ ID NO: 84658 - DNA, 40 bp, Homo sapiens
tatattcacattttaatactttttatgtatttcagggtgt

SEQ ID NO: 84659 - DNA, 40 bp, Homo sapiens
acaccctgaaatacataaaaagtattaaaatgtgaatata

SEQ ID NO: 84660 - DNA, 40 bp, Homo sapiens
atattcacattttaatactttttatgtatttcagggtgtt

SEQ ID NO: 84661 - DNA, 40 bp, Homo sapiens
aacaccctgaaatacataaaaagtattaaaatgtgaatat

SEQ ID NO: 84662 - DNA, 40 bp, Homo sapiens
tattcacattttaatactttttatgtatttcagggtgttg

SEQ ID NO: 84663 - DNA, 40 bp, Homo sapiens
caacaccctgaaatacataaaaagtattaaaatgtgaata

SEQ ID NO: 84664 - DNA, 40 bp, Homo sapiens
attcacattttaatactttttatgtatttcagggtgttga

SEQ ID NO: 84665 - DNA, 40 bp, Homo sapiens
tcaacaccctgaaatacataaaaagtattaaaatgtgaat

SEQ ID NO: 84666 - DNA, 40 bp, Homo sapiens
ttcacattttaatactttttatgtatttcagggtgttgat

SEQ ID NO: 84667 - DNA, 40 bp, Homo sapiens
atcaacaccctgaaatacataaaaagtattaaaatgtgaa

SEQ ID NO: 84668 - DNA, 40 bp, Homo sapiens
tcacattttaatactttttatgtatttcagggtgttgatg

SEQ ID NO: 84669 - DNA, 40 bp, Homo sapiens
catcaacaccctgaaatacataaaaagtattaaaatgtga

SEQ ID NO: 84670 - DNA, 40 bp, Homo sapiens
cacattttaatactttttatgtatttcagggtgttgatga

SEQ ID NO: 84671 - DNA, 40 bp, Homo sapiens
tcatcaacaccctgaaatacataaaaagtattaaaatgtg

SEQ ID NO: 84672 - DNA, 40 bp, Homo sapiens
acattttaatactttttatgtatttcagggtgttgatgat

SEQ ID NO: 84673 - DNA, 40 bp, Homo sapiens
atcatcaacaccctgaaatacataaaaagtattaaaatgt

SEQ ID NO: 84674 - DNA, 40 bp, Homo sapiens
cattttaatactttttatgtatttcagggtgttgatgatg

SEQ ID NO: 84675 - DNA, 40 bp, Homo sapiens
catcatcaacaccctgaaatacataaaaagtattaaaatg

SEQ ID NO: 84676 - DNA, 40 bp, Homo sapiens
attttaatactttttatgtatttcagggtgttgatgatgc

SEQ ID NO: 84677 - DNA, 40 bp, Homo sapiens
gcatcatcaacaccctgaaatacataaaaagtattaaaat

SEQ ID NO: 84678 - DNA, 40 bp, Homo sapiens
ttttaatactttttatgtatttcagggtgttgatgatgcc

SEQ ID NO: 84679 - DNA, 40 bp, Homo sapiens
ggcatcatcaacaccctgaaatacataaaaagtattaaaa

SEQ ID NO: 84680 - DNA, 40 bp, Homo sapiens
tttaatactttttatgtatttcagggtgttgatgatgcct

SEQ ID NO: 84681 - DNA, 40 bp, Homo sapiens
aggcatcatcaacaccctgaaatacataaaaagtattaaa

SEQ ID NO: 84682 - DNA, 40 bp, Homo sapiens
ttaatactttttatgtatttcagggtgttgatgatgcctt

SEQ ID NO: 84683 - DNA, 40 bp, Homo sapiens
aaggcatcatcaacaccctgaaatacataaaaagtattaa

SEQ ID NO: 84684 - DNA, 40 bp, Homo sapiens
taatactttttatgtatttcagggtgttgatgatgccttc

SEQ ID NO: 84685 - DNA, 40 bp, Homo sapiens
gaaggcatcatcaacaccctgaaatacataaaaagtatta

SEQ ID NO: 84686 - DNA, 40 bp, Homo sapiens
aatactttttatgtatttcagggtgttgatgatgccttct

SEQ ID NO: 84687 - DNA, 40 bp, Homo sapiens
agaaggcatcatcaacaccctgaaatacataaaaagtatt

SEQ ID NO: 84688 - DNA, 40 bp, Homo sapiens
atactttttatgtatttcagggtgttgatgatgccttcta

SEQ ID NO: 84689 - DNA, 40 bp, Homo sapiens
tagaaggcatcatcaacaccctgaaatacataaaaagtat

SEQ ID NO: 84690 - DNA, 40 bp, Homo sapiens
tactttttatgtatttcagggtgttgatgatgccttctat

SEQ ID NO: 84691 - DNA, 40 bp, Homo sapiens
atagaaggcatcatcaacaccctgaaatacataaaaagta

SEQ ID NO: 84692 - DNA, 40 bp, Homo sapiens
actttttatgtatttcagggtgttgatgatgccttctata

SEQ ID NO: 84693 - DNA, 40 bp, Homo sapiens
tatagaaggcatcatcaacaccctgaaatacataaaaagt

SEQ ID NO: 84694 - DNA, 40 bp, Homo sapiens
ctttttatgtatttcagggtgttgatgatgccttctatac

SEQ ID NO: 84695 - DNA, 40 bp, Homo sapiens
gtatagaaggcatcatcaacaccctgaaatacataaaaag

SEQ ID NO: 84696 - DNA, 40 bp, Homo sapiens
tttttatgtatttcagggtgttgatgatgccttctataca

SEQ ID NO: 84697 - DNA, 40 bp, Homo sapiens
tgtatagaaggcatcatcaacaccctgaaatacataaaaa

SEQ ID NO: 84698 - DNA, 40 bp, Homo sapiens
ttttatgtatttcagggtgttgatgatgccttctatacat

SEQ ID NO: 84699 - DNA, 40 bp, Homo sapiens
atgtatagaaggcatcatcaacaccctgaaatacataaaa

SEQ ID NO: 84700 - DNA, 40 bp, Homo sapiens
tttatgtatttcagggtgttgatgatgccttctatacatt

SEQ ID NO: 84701 - DNA, 40 bp, Homo sapiens
aatgtatagaaggcatcatcaacaccctgaaatacataaa

SEQ ID NO: 84702 - DNA, 40 bp, Homo sapiens
ttatgtatttcagggtgttgatgatgccttctatacatta

SEQ ID NO: 84703 - DNA, 40 bp, Homo sapiens
taatgtatagaaggcatcatcaacaccctgaaatacataa

SEQ ID NO: 84704 - DNA, 40 bp, Homo sapiens
tatgtatttcagggtgttgatgatgccttctatacattag

SEQ ID NO: 84705 - DNA, 40 bp, Homo sapiens
ctaatgtatagaaggcatcatcaacaccctgaaatacata

SEQ ID NO: 84706 - DNA, 40 bp, Homo sapiens
atgtatttcagggtgttgatgatgccttctatacattagt

SEQ ID NO: 84707 - DNA, 40 bp, Homo sapiens
actaatgtatagaaggcatcatcaacaccctgaaatacat

SEQ ID NO: 84708 - DNA, 40 bp, Homo sapiens
tgtatttcagggtgttgatgatgccttctatacattagtt

SEQ ID NO: 84709 - DNA, 40 bp, Homo sapiens
aactaatgtatagaaggcatcatcaacaccctgaaataca

SEQ ID NO: 84710 - DNA, 40 bp, Homo sapiens
gtatttcagggtgttgatgatgccttctatacattagttc

SEQ ID NO: 84711 - DNA, 40 bp, Homo sapiens
gaactaatgtatagaaggcatcatcaacaccctgaaatac

SEQ ID NO: 84712 - DNA, 40 bp, Homo sapiens
tatttcagggtgttgatgatgccttctatacattagttcg

SEQ ID NO: 84713 - DNA, 40 bp, Homo sapiens
cgaactaatgtatagaaggcatcatcaacaccctgaaata

SEQ ID NO: 84714 - DNA, 40 bp, Homo sapiens
atttcagggtgttgatgatgccttctatacattagttcga

SEQ ID NO: 84715 - DNA, 40 bp, Homo sapiens
tcgaactaatgtatagaaggcatcatcaacaccctgaaat

SEQ ID NO: 84716 - DNA, 40 bp, Homo sapiens
tttcagggtgttgatgatgccttctatacattagttcgag

SEQ ID NO: 84717 - DNA, 40 bp, Homo sapiens
ctcgaactaatgtatagaaggcatcatcaacaccctgaaa

SEQ ID NO: 84718 - DNA, 40 bp, Homo sapiens
ttcagggtgttgatgatgccttctatacattagttcgaga

SEQ ID NO: 84719 - DNA, 40 bp, Homo sapiens
tctcgaactaatgtatagaaggcatcatcaacaccctgaa

SEQ ID NO: 84720 - DNA, 40 bp, Homo sapiens
tcagggtgttgatgatgccttctatacattagttcgagaa

SEQ ID NO: 84721 - DNA, 40 bp, Homo sapiens
ttctcgaactaatgtatagaaggcatcatcaacaccctga

SEQ ID NO: 84722 - DNA, 40 bp, Homo sapiens
cagggtgttgatgatgccttctatacattagttcgagaaa

SEQ ID NO: 84723 - DNA, 40 bp, Homo sapiens
tttctcgaactaatgtatagaaggcatcatcaacaccctg

SEQ ID NO: 84724 - DNA, 40 bp, Homo sapiens
agggtgttgatgatgccttctatacattagttcgagaaat

SEQ ID NO: 84725 - DNA, 40 bp, Homo sapiens
atttctcgaactaatgtatagaaggcatcatcaacaccct

SEQ ID NO: 84726 - DNA, 40 bp, Homo sapiens
gggtgttgatgatgccttctatacattagttcgagaaatt

SEQ ID NO: 84727 - DNA, 40 bp, Homo sapiens
aatttctcgaactaatgtatagaaggcatcatcaacaccc

SEQ ID NO: 84728 - DNA, 40 bp, Homo sapiens
ggtgttgatgatgccttctatacattagttcgagaaattc

SEQ ID NO: 84729 - DNA, 40 bp, Homo sapiens
gaatttctcgaactaatgtatagaaggcatcatcaacacc

SEQ ID NO: 84730 - DNA, 40 bp, Homo sapiens
gtgttgatgatgccttctatacattagttcgagaaattcg

SEQ ID NO: 84731 - DNA, 40 bp, Homo sapiens
cgaatttctcgaactaatgtatagaaggcatcatcaacac

SEQ ID NO: 84732 - DNA, 40 bp, Homo sapiens
tgttgatgatgccttctatacattagttcgagaaattcga

SEQ ID NO: 84733 - DNA, 40 bp, Homo sapiens
tcgaatttctcgaactaatgtatagaaggcatcatcaaca

SEQ ID NO: 84734 - DNA, 40 bp, Homo sapiens
gttgatgatgccttctatacattagttcgagaaattcgaa

SEQ ID NO: 84735 - DNA, 40 bp, Homo sapiens
ttcgaatttctcgaactaatgtatagaaggcatcatcaac

SEQ ID NO: 84736 - DNA, 40 bp, Homo sapiens
ttgatgatgccttctatacattagttcgagaaattcgaaa

SEQ ID NO: 84737 - DNA, 40 bp, Homo sapiens
tttcgaatttctcgaactaatgtatagaaggcatcatcaa

SEQ ID NO: 84738 - DNA, 40 bp, Homo sapiens
tgatgatgccttctatacattagttcgagaaattcgaaaa

SEQ ID NO: 84739 - DNA, 40 bp, Homo sapiens
ttttcgaatttctcgaactaatgtatagaaggcatcatca

SEQ ID NO: 84740 - DNA, 40 bp, Homo sapiens
gatgatgccttctatacattagttcgagaaattcgaaaac

SEQ ID NO: 84741 - DNA, 40 bp, Homo sapiens
gttttcgaatttctcgaactaatgtatagaaggcatcatc

SEQ ID NO: 84742 - DNA, 40 bp, Homo sapiens
atgatgccttctatacattagttcgagaaattcgaaaaca

SEQ ID NO: 84743 - DNA, 40 bp, Homo sapiens
tgttttcgaatttctcgaactaatgtatagaaggcatcat

SEQ ID NO: 84744 - DNA, 40 bp, Homo sapiens
tgatgccttctatacattagttcgagaaattcgaaaacat

SEQ ID NO: 84745 - DNA, 40 bp, Homo sapiens
atgttttcgaatttctcgaactaatgtatagaaggcatca

SEQ ID NO: 84746 - DNA, 40 bp, Homo sapiens
gatgccttctatacattagttcgagaaattcgaaaacata

SEQ ID NO: 84747 - DNA, 40 bp, Homo sapiens
tatgttttcgaatttctcgaactaatgtatagaaggcatc

SEQ ID NO: 84748 - DNA, 40 bp, Homo sapiens
atgccttctatacattagttcgagaaattcgaaaacataa

SEQ ID NO: 84749 - DNA, 40 bp, Homo sapiens
ttatgttttcgaatttctcgaactaatgtatagaaggcat

SEQ ID NO: 84750 - DNA, 40 bp, Homo sapiens
tgccttctatacattagttcgagaaattcgaaaacataaa

SEQ ID NO: 84751 - DNA, 40 bp, Homo sapiens
tttatgttttcgaatttctcgaactaatgtatagaaggca

SEQ ID NO: 84752 - DNA, 40 bp, Homo sapiens
gccttctatacattagttcgagaaattcgaaaacataaag

SEQ ID NO: 84753 - DNA, 40 bp, Homo sapiens
ctttatgttttcgaatttctcgaactaatgtatagaaggc

SEQ ID NO: 84754 - DNA, 40 bp, Homo sapiens
ccttctatacattagttcgagaaattcgaaaacataaaga

SEQ ID NO: 84755 - DNA, 40 bp, Homo sapiens
tctttatgttttcgaatttctcgaactaatgtatagaagg

SEQ ID NO: 84756 - DNA, 40 bp, Homo sapiens
cttctatacattagttcgagaaattcgaaaacataaagaa

SEQ ID NO: 84757 - DNA, 40 bp, Homo sapiens
ttctttatgttttcgaatttctcgaactaatgtatagaag

SEQ ID NO: 84758 - DNA, 40 bp, Homo sapiens
ttctatacattagttcgagaaattcgaaaacataaagaaa

SEQ ID NO: 84759 - DNA, 40 bp, Homo sapiens
tttctttatgttttcgaatttctcgaactaatgtatagaa

SEQ ID NO: 84760 - DNA, 40 bp, Homo sapiens
tctatacattagttcgagaaattcgaaaacataaagaaaa

SEQ ID NO: 84761 - DNA, 40 bp, Homo sapiens
ttttctttatgttttcgaatttctcgaactaatgtataga

SEQ ID NO: 84762 - DNA, 40 bp, Homo sapiens
ctatacattagttcgagaaattcgaaaacataaagaaaag

SEQ ID NO: 84763 - DNA, 40 bp, Homo sapiens
cttttctttatgttttcgaatttctcgaactaatgtatag

SEQ ID NO: 84764 - DNA, 40 bp, Homo sapiens
tatacattagttcgagaaattcgaaaacataaagaaaaga

SEQ ID NO: 84765 - DNA, 40 bp, Homo sapiens
tcttttctttatgttttcgaatttctcgaactaatgtata

SEQ ID NO: 84766 - DNA, 40 bp, Homo sapiens
atacattagttcgagaaattcgaaaacataaagaaaagat

SEQ ID NO: 84767 - DNA, 40 bp, Homo sapiens
atcttttctttatgttttcgaatttctcgaactaatgtat

SEQ ID NO: 84768 - DNA, 40 bp, Homo sapiens
tacattagttcgagaaattcgaaaacataaagaaaagatg

SEQ ID NO: 84769 - DNA, 40 bp, Homo sapiens
catcttttctttatgttttcgaatttctcgaactaatgta

SEQ ID NO: 84770 - DNA, 40 bp, Homo sapiens
acattagttcgagaaattcgaaaacataaagaaaagatga

SEQ ID NO: 84771 - DNA, 40 bp, Homo sapiens
tcatcttttctttatgttttcgaatttctcgaactaatgt

SEQ ID NO: 84772 - DNA, 40 bp, Homo sapiens
cattagttcgagaaattcgaaaacataaagaaaagatgag

SEQ ID NO: 84773 - DNA, 40 bp, Homo sapiens
ctcatcttttctttatgttttcgaatttctcgaactaatg

SEQ ID NO: 84774 - DNA, 40 bp, Homo sapiens
attagttcgagaaattcgaaaacataaagaaaagatgagc

SEQ ID NO: 84775 - DNA, 40 bp, Homo sapiens
gctcatcttttctttatgttttcgaatttctcgaactaat

SEQ ID NO: 84776 - DNA, 40 bp, Homo sapiens
ttagttcgagaaattcgaaaacataaagaaaagatgagca

SEQ ID NO: 84777 - DNA, 40 bp, Homo sapiens
tgctcatcttttctttatgttttcgaatttctcgaactaa

SEQ ID NO: 84778 - DNA, 40 bp, Homo sapiens
tagttcgagaaattcgaaaacataaagaaaagatgagcaa

SEQ ID NO: 84779 - DNA, 40 bp, Homo sapiens
ttgctcatcttttctttatgttttcgaatttctcgaacta

SEQ ID NO: 84780 - DNA, 40 bp, Homo sapiens
agttcgagaaattcgaaaacataaagaaaagatgagcaaa

SEQ ID NO: 84781 - DNA, 40 bp, Homo sapiens
tttgctcatcttttctttatgttttcgaatttctcgaact

SEQ ID NO: 84782 - DNA, 40 bp, Homo sapiens
gttcgagaaattcgaaaacataaagaaaagatgagcaaag

SEQ ID NO: 84783 - DNA, 40 bp, Homo sapiens
ctttgctcatcttttctttatgttttcgaatttctcgaac

SEQ ID NO: 84784 - DNA, 40 bp, Homo sapiens
ttcgagaaattcgaaaacataaagaaaagatgagcaaaga

SEQ ID NO: 84785 - DNA, 40 bp, Homo sapiens
tctttgctcatcttttctttatgttttcgaatttctcgaa

SEQ ID NO: 84786 - DNA, 40 bp, Homo sapiens
tcgagaaattcgaaaacataaagaaaagatgagcaaagat

SEQ ID NO: 84787 - DNA, 40 bp, Homo sapiens
atctttgctcatcttttctttatgttttcgaatttctcga

SEQ ID NO: 84788 - DNA, 40 bp, Homo sapiens
cgagaaattcgaaaacataaagaaaagatgagcaaagatg

SEQ ID NO: 84789 - DNA, 40 bp, Homo sapiens
catctttgctcatcttttctttatgttttcgaatttctcg

SEQ ID NO: 84790 - DNA, 40 bp, Homo sapiens
gagaaattcgaaaacataaagaaaagatgagcaaagatgg

SEQ ID NO: 84791 - DNA, 40 bp, Homo sapiens
ccatctttgctcatcttttctttatgttttcgaatttctc

SEQ ID NO: 84792 - DNA, 40 bp, Homo sapiens
agaaattcgaaaacataaagaaaagatgagcaaagatggt

SEQ ID NO: 84793 - DNA, 40 bp, Homo sapiens
accatctttgctcatcttttctttatgttttcgaatttct

SEQ ID NO: 84794 - DNA, 40 bp, Homo sapiens
gaaattcgaaaacataaagaaaagatgagcaaagatggta

SEQ ID NO: 84795 - DNA, 40 bp, Homo sapiens
taccatctttgctcatcttttctttatgttttcgaatttc

SEQ ID NO: 84796 - DNA, 40 bp, Homo sapiens
aaattcgaaaacataaagaaaagatgagcaaagatggtaa

SEQ ID NO: 84797 - DNA, 40 bp, Homo sapiens
ttaccatctttgctcatcttttctttatgttttcgaattt

SEQ ID NO: 84798 - DNA, 40 bp, Homo sapiens
aattcgaaaacataaagaaaagatgagcaaagatggtaaa

SEQ ID NO: 84799 - DNA, 40 bp, Homo sapiens
tttaccatctttgctcatcttttctttatgttttcgaatt

SEQ ID NO: 84800 - DNA, 40 bp, Homo sapiens
attcgaaaacataaagaaaagatgagcaaagatggtaaaa

SEQ ID NO: 84801 - DNA, 40 bp, Homo sapiens
ttttaccatctttgctcatcttttctttatgttttcgaat

SEQ ID NO: 84802 - DNA, 40 bp, Homo sapiens
ttcgaaaacataaagaaaagatgagcaaagatggtaaaaa

SEQ ID NO: 84803 - DNA, 40 bp, Homo sapiens
tttttaccatctttgctcatcttttctttatgttttcgaa

SEQ ID NO: 84804 - DNA, 40 bp, Homo sapiens
tcgaaaacataaagaaaagatgagcaaagatggtaaaaag

SEQ ID NO: 84805 - DNA, 40 bp, Homo sapiens
ctttttaccatctttgctcatcttttctttatgttttcga

SEQ ID NO: 84806 - DNA, 40 bp, Homo sapiens
cgaaaacataaagaaaagatgagcaaagatggtaaaaaga

SEQ ID NO: 84807 - DNA, 40 bp, Homo sapiens
tctttttaccatctttgctcatcttttctttatgttttcg

SEQ ID NO: 84808 - DNA, 40 bp, Homo sapiens
gaaaacataaagaaaagatgagcaaagatggtaaaaagaa

SEQ ID NO: 84809 - DNA, 40 bp, Homo sapiens
ttctttttaccatctttgctcatcttttctttatgttttc

SEQ ID NO: 84810 - DNA, 40 bp, Homo sapiens
aaaacataaagaaaagatgagcaaagatggtaaaaagaag

SEQ ID NO: 84811 - DNA, 40 bp, Homo sapiens
cttctttttaccatctttgctcatcttttctttatgtttt

SEQ ID NO: 84812 - DNA, 40 bp, Homo sapiens
aaacataaagaaaagatgagcaaagatggtaaaaagaaga

SEQ ID NO: 84813 - DNA, 40 bp, Homo sapiens
tcttctttttaccatctttgctcatcttttctttatgttt

SEQ ID NO: 84814 - DNA, 40 bp, Homo sapiens
aacataaagaaaagatgagcaaagatggtaaaaagaagaa

SEQ ID NO: 84815 - DNA, 40 bp, Homo sapiens
ttcttctttttaccatctttgctcatcttttctttatgtt

SEQ ID NO: 84816 - DNA, 40 bp, Homo sapiens
acataaagaaaagatgagcaaagatggtaaaaagaagaaa

SEQ ID NO: 84817 - DNA, 40 bp, Homo sapiens
tttcttctttttaccatctttgctcatcttttctttatgt

SEQ ID NO: 84818 - DNA, 40 bp, Homo sapiens
cataaagaaaagatgagcaaagatggtaaaaagaagaaaa

SEQ ID NO: 84819 - DNA, 40 bp, Homo sapiens
ttttcttctttttaccatctttgctcatcttttctttatg

SEQ ID NO: 84820 - DNA, 40 bp, Homo sapiens
ataaagaaaagatgagcaaagatggtaaaaagaagaaaaa

SEQ ID NO: 84821 - DNA, 40 bp, Homo sapiens
tttttcttctttttaccatctttgctcatcttttctttat

SEQ ID NO: 84822 - DNA, 40 bp, Homo sapiens
taaagaaaagatgagcaaagatggtaaaaagaagaaaaag

SEQ ID NO: 84823 - DNA, 40 bp, Homo sapiens
ctttttcttctttttaccatctttgctcatcttttcttta

SEQ ID NO: 84824 - DNA, 40 bp, Homo sapiens
aaagaaaagatgagcaaagatggtaaaaagaagaaaaaga

SEQ ID NO: 84825 - DNA, 40 bp, Homo sapiens
tctttttcttctttttaccatctttgctcatcttttcttt

SEQ ID NO: 84826 - DNA, 40 bp, Homo sapiens
aagaaaagatgagcaaagatggtaaaaagaagaaaaagaa

SEQ ID NO: 84827 - DNA, 40 bp, Homo sapiens
ttctttttcttctttttaccatctttgctcatcttttctt

SEQ ID NO: 84828 - DNA, 40 bp, Homo sapiens
agaaaagatgagcaaagatggtaaaaagaagaaaaagaag

SEQ ID NO: 84829 - DNA, 40 bp, Homo sapiens
cttctttttcttctttttaccatctttgctcatcttttct

SEQ ID NO: 84830 - DNA, 40 bp, Homo sapiens
gaaaagatgagcaaagatggtaaaaagaagaaaaagaagt

SEQ ID NO: 84831 - DNA, 40 bp, Homo sapiens
acttctttttcttctttttaccatctttgctcatcttttc

SEQ ID NO: 84832 - DNA, 40 bp, Homo sapiens
aaaagatgagcaaagatggtaaaaagaagaaaaagaagtc

SEQ ID NO: 84833 - DNA, 40 bp, Homo sapiens
gacttctttttcttctttttaccatctttgctcatctttt

SEQ ID NO: 84834 - DNA, 40 bp, Homo sapiens
aaagatgagcaaagatggtaaaaagaagaaaaagaagtca

SEQ ID NO: 84835 - DNA, 40 bp, Homo sapiens
tgacttctttttcttctttttaccatctttgctcatcttt

SEQ ID NO: 84836 - DNA, 40 bp, Homo sapiens
aagatgagcaaagatggtaaaaagaagaaaaagaagtcaa

SEQ ID NO: 84837 - DNA, 40 bp, Homo sapiens
ttgacttctttttcttctttttaccatctttgctcatctt

SEQ ID NO: 84838 - DNA, 40 bp, Homo sapiens
agatgagcaaagatggtaaaaagaagaaaaagaagtcaaa

SEQ ID NO: 84839 - DNA, 40 bp, Homo sapiens
tttgacttctttttcttctttttaccatctttgctcatct

SEQ ID NO: 84840 - DNA, 40 bp, Homo sapiens
gatgagcaaagatggtaaaaagaagaaaaagaagtcaaag

SEQ ID NO: 84841 - DNA, 40 bp, Homo sapiens
ctttgacttctttttcttctttttaccatctttgctcatc

SEQ ID NO: 84842 - DNA, 40 bp, Homo sapiens
atgagcaaagatggtaaaaagaagaaaaagaagtcaaaga

SEQ ID NO: 84843 - DNA, 40 bp, Homo sapiens
tctttgacttctttttcttctttttaccatctttgctcat

SEQ ID NO: 84844 - DNA, 40 bp, Homo sapiens
tgagcaaagatggtaaaaagaagaaaaagaagtcaaagac

SEQ ID NO: 84845 - DNA, 40 bp, Homo sapiens
gtctttgacttctttttcttctttttaccatctttgctca

SEQ ID NO: 84846 - DNA, 40 bp, Homo sapiens
gagcaaagatggtaaaaagaagaaaaagaagtcaaagaca

SEQ ID NO: 84847 - DNA, 40 bp, Homo sapiens
tgtctttgacttctttttcttctttttaccatctttgctc

SEQ ID NO: 84848 - DNA, 40 bp, Homo sapiens
agcaaagatggtaaaaagaagaaaaagaagtcaaagacaa

SEQ ID NO: 84849 - DNA, 40 bp, Homo sapiens
ttgtctttgacttctttttcttctttttaccatctttgct

SEQ ID NO: 84850 - DNA, 40 bp, Homo sapiens
gcaaagatggtaaaaagaagaaaaagaagtcaaagacaaa

SEQ ID NO: 84851 - DNA, 40 bp, Homo sapiens
tttgtctttgacttctttttcttctttttaccatctttgc

SEQ ID NO: 84852 - DNA, 40 bp, Homo sapiens
caaagatggtaaaaagaagaaaaagaagtcaaagacaaag

SEQ ID NO: 84853 - DNA, 40 bp, Homo sapiens
ctttgtctttgacttctttttcttctttttaccatctttg

SEQ ID NO: 84854 - DNA, 40 bp, Homo sapiens
aaagatggtaaaaagaagaaaaagaagtcaaagacaaagt

SEQ ID NO: 84855 - DNA, 40 bp, Homo sapiens
actttgtctttgacttctttttcttctttttaccatcttt

SEQ ID NO: 84856 - DNA, 40 bp, Homo sapiens
aagatggtaaaaagaagaaaaagaagtcaaagacaaagtg

SEQ ID NO: 84857 - DNA, 40 bp, Homo sapiens
cactttgtctttgacttctttttcttctttttaccatctt

SEQ ID NO: 84858 - DNA, 40 bp, Homo sapiens
agatggtaaaaagaagaaaaagaagtcaaagacaaagtgt

SEQ ID NO: 84859 - DNA, 40 bp, Homo sapiens
acactttgtctttgacttctttttcttctttttaccatct

SEQ ID NO: 84860 - DNA, 40 bp, Homo sapiens
gatggtaaaaagaagaaaaagaagtcaaagacaaagtgtg

SEQ ID NO: 84861 - DNA, 40 bp, Homo sapiens
cacactttgtctttgacttctttttcttctttttaccatc

SEQ ID NO: 84862 - DNA, 40 bp, Homo sapiens
atggtaaaaagaagaaaaagaagtcaaagacaaagtgtgt

SEQ ID NO: 84863 - DNA, 40 bp, Homo sapiens
acacactttgtctttgacttctttttcttctttttaccat

SEQ ID NO: 84864 - DNA, 40 bp, Homo sapiens
tggtaaaaagaagaaaaagaagtcaaagacaaagtgtgta

SEQ ID NO: 84865 - DNA, 40 bp, Homo sapiens
tacacactttgtctttgacttctttttcttctttttacca

SEQ ID NO: 84866 - DNA, 40 bp, Homo sapiens
ggtaaaaagaagaaaaagaagtcaaagacaaagtgtgtaa

SEQ ID NO: 84867 - DNA, 40 bp, Homo sapiens
ttacacactttgtctttgacttctttttcttctttttacc

SEQ ID NO: 84868 - DNA, 40 bp, Homo sapiens
gtaaaaagaagaaaaagaagtcaaagacaaagtgtgtaat

SEQ ID NO: 84869 - DNA, 40 bp, Homo sapiens
attacacactttgtctttgacttctttttcttctttttac

SEQ ID NO: 84870 - DNA, 40 bp, Homo sapiens
taaaaagaagaaaaagaagtcaaagacaaagtgtgtaatt

SEQ ID NO: 84871 - DNA, 40 bp, Homo sapiens
aattacacactttgtctttgacttctttttcttcttttta

SEQ ID NO: 84872 - DNA, 40 bp, Homo sapiens
aaaaagaagaaaaagaagtcaaagacaaagtgtgtaatta

SEQ ID NO: 84873 - DNA, 40 bp, Homo sapiens
taattacacactttgtctttgacttctttttcttcttttt

SEQ ID NO: 84874 - DNA, 40 bp, Homo sapiens
aaaagaagaaaaagaagtcaaagacaaagtgtgtaattat

SEQ ID NO: 84875 - DNA, 40 bp, Homo sapiens
ataattacacactttgtctttgacttctttttcttctttt

SEQ ID NO: 84876 - DNA, 40 bp, Homo sapiens
aaagaagaaaaagaagtcaaagacaaagtgtgtaattatg

SEQ ID NO: 84877 - DNA, 40 bp, Homo sapiens
cataattacacactttgtctttgacttctttttcttcttt

SEQ ID NO: 84878 - DNA, 40 bp, Homo sapiens
aagaagaaaaagaagtcaaagacaaagtgtgtaattatgt

SEQ ID NO: 84879 - DNA, 40 bp, Homo sapiens
acataattacacactttgtctttgacttctttttcttctt

SEQ ID NO: 84880 - DNA, 40 bp, Homo sapiens
agaagaaaaagaagtcaaagacaaagtgtgtaattatgta

SEQ ID NO: 84881 - DNA, 40 bp, Homo sapiens
tacataattacacactttgtctttgacttctttttcttct

SEQ ID NO: 84882 - DNA, 40 bp, Homo sapiens
gaagaaaaagaagtcaaagacaaagtgtgtaattatgtaa

SEQ ID NO: 84883 - DNA, 40 bp, Homo sapiens
ttacataattacacactttgtctttgacttctttttcttc

SEQ ID NO: 84884 - DNA, 40 bp, Homo sapiens
aagaaaaagaagtcaaagacaaagtgtgtaattatgtaaa

SEQ ID NO: 84885 - DNA, 40 bp, Homo sapiens
tttacataattacacactttgtctttgacttctttttctt

SEQ ID NO: 84886 - DNA, 40 bp, Homo sapiens
agaaaaagaagtcaaagacaaagtgtgtaattatgtaaat

SEQ ID NO: 84887 - DNA, 40 bp, Homo sapiens
atttacataattacacactttgtctttgacttctttttct

SEQ ID NO: 84888 - DNA, 40 bp, Homo sapiens
gaaaaagaagtcaaagacaaagtgtgtaattatgtaaata

SEQ ID NO: 84889 - DNA, 40 bp, Homo sapiens
tatttacataattacacactttgtctttgacttctttttc

SEQ ID NO: 84890 - DNA, 40 bp, Homo sapiens
aaaaagaagtcaaagacaaagtgtgtaattatgtaaatac

SEQ ID NO: 84891 - DNA, 40 bp, Homo sapiens
gtatttacataattacacactttgtctttgacttcttttt

SEQ ID NO: 84892 - DNA, 40 bp, Homo sapiens
aaaagaagtcaaagacaaagtgtgtaattatgtaaataca

SEQ ID NO: 84893 - DNA, 40 bp, Homo sapiens
tgtatttacataattacacactttgtctttgacttctttt

SEQ ID NO: 84894 - DNA, 40 bp, Homo sapiens
aaagaagtcaaagacaaagtgtgtaattatgtaaatacaa

SEQ ID NO: 84895 - DNA, 40 bp, Homo sapiens
ttgtatttacataattacacactttgtctttgacttcttt

SEQ ID NO: 84896 - DNA, 40 bp, Homo sapiens
aagaagtcaaagacaaagtgtgtaattatgtaaatacaat

SEQ ID NO: 84897 - DNA, 40 bp, Homo sapiens
attgtatttacataattacacactttgtctttgacttctt

SEQ ID NO: 84898 - DNA, 40 bp, Homo sapiens
agaagtcaaagacaaagtgtgtaattatgtaaatacaatt

SEQ ID NO: 84899 - DNA, 40 bp, Homo sapiens
aattgtatttacataattacacactttgtctttgacttct

SEQ ID NO: 84900 - DNA, 40 bp, Homo sapiens
gaagtcaaagacaaagtgtgtaattatgtaaatacaattt

SEQ ID NO: 84901 - DNA, 40 bp, Homo sapiens
aaattgtatttacataattacacactttgtctttgacttc

SEQ ID NO: 84902 - DNA, 40 bp, Homo sapiens
aagtcaaagacaaagtgtgtaattatgtaaatacaatttg

SEQ ID NO: 84903 - DNA, 40 bp, Homo sapiens
caaattgtatttacataattacacactttgtctttgactt

SEQ ID NO: 84904 - DNA, 40 bp, Homo sapiens
agtcaaagacaaagtgtgtaattatgtaaatacaatttgt

SEQ ID NO: 84905 - DNA, 40 bp, Homo sapiens
acaaattgtatttacataattacacactttgtctttgact

SEQ ID NO: 84906 - DNA, 40 bp, Homo sapiens
gtcaaagacaaagtgtgtaattatgtaaatacaatttgta

SEQ ID NO: 84907 - DNA, 40 bp, Homo sapiens
tacaaattgtatttacataattacacactttgtctttgac

SEQ ID NO: 84908 - DNA, 40 bp, Homo sapiens
tcaaagacaaagtgtgtaattatgtaaatacaatttgtac

SEQ ID NO: 84909 - DNA, 40 bp, Homo sapiens
gtacaaattgtatttacataattacacactttgtctttga

SEQ ID NO: 84910 - DNA, 40 bp, Homo sapiens
caaagacaaagtgtgtaattatgtaaatacaatttgtact

SEQ ID NO: 84911 - DNA, 40 bp, Homo sapiens
agtacaaattgtatttacataattacacactttgtctttg

SEQ ID NO: 84912 - DNA, 40 bp, Homo sapiens
aaagacaaagtgtgtaattatgtaaatacaatttgtactt

SEQ ID NO: 84913 - DNA, 40 bp, Homo sapiens
aagtacaaattgtatttacataattacacactttgtcttt

SEQ ID NO: 84914 - DNA, 40 bp, Homo sapiens
aagacaaagtgtgtaattatgtaaatacaatttgtacttt

SEQ ID NO: 84915 - DNA, 40 bp, Homo sapiens
aaagtacaaattgtatttacataattacacactttgtctt

SEQ ID NO: 84916 - DNA, 40 bp, Homo sapiens
agacaaagtgtgtaattatgtaaatacaatttgtactttt

SEQ ID NO: 84917 - DNA, 40 bp, Homo sapiens
aaaagtacaaattgtatttacataattacacactttgtct

SEQ ID NO: 84918 - DNA, 40 bp, Homo sapiens
gacaaagtgtgtaattatgtaaatacaatttgtacttttt

SEQ ID NO: 84919 - DNA, 40 bp, Homo sapiens
aaaaagtacaaattgtatttacataattacacactttgtc

SEQ ID NO: 84920 - DNA, 40 bp, Homo sapiens
acaaagtgtgtaattatgtaaatacaatttgtactttttt

SEQ ID NO: 84921 - DNA, 40 bp, Homo sapiens
aaaaaagtacaaattgtatttacataattacacactttgt

SEQ ID NO: 84922 - DNA, 40 bp, Homo sapiens
caaagtgtgtaattatgtaaatacaatttgtacttttttc

SEQ ID NO: 84923 - DNA, 40 bp, Homo sapiens
gaaaaaagtacaaattgtatttacataattacacactttg

SEQ ID NO: 84924 - DNA, 40 bp, Homo sapiens
aaagtgtgtaattatgtaaatacaatttgtacttttttct

SEQ ID NO: 84925 - DNA, 40 bp, Homo sapiens
agaaaaaagtacaaattgtatttacataattacacacttt

SEQ ID NO: 84926 - DNA, 40 bp, Homo sapiens
aagtgtgtaattatgtaaatacaatttgtacttttttctt

SEQ ID NO: 84927 - DNA, 40 bp, Homo sapiens
aagaaaaaagtacaaattgtatttacataattacacactt

SEQ ID NO: 84928 - DNA, 40 bp, Homo sapiens
agtgtgtaattatgtaaatacaatttgtacttttttctta

SEQ ID NO: 84929 - DNA, 40 bp, Homo sapiens
taagaaaaaagtacaaattgtatttacataattacacact

SEQ ID NO: 84930 - DNA, 40 bp, Homo sapiens
gtgtgtaattatgtaaatacaatttgtacttttttcttaa

SEQ ID NO: 84931 - DNA, 40 bp, Homo sapiens
ttaagaaaaaagtacaaattgtatttacataattacacac

SEQ ID NO: 84932 - DNA, 40 bp, Homo sapiens
tgtgtaattatgtaaatacaatttgtacttttttcttaag

SEQ ID NO: 84933 - DNA, 40 bp, Homo sapiens
cttaagaaaaaagtacaaattgtatttacataattacaca

SEQ ID NO: 84934 - DNA, 40 bp, Homo sapiens
gtgtaattatgtaaatacaatttgtacttttttcttaagg

SEQ ID NO: 84935 - DNA, 40 bp, Homo sapiens
ccttaagaaaaaagtacaaattgtatttacataattacac

SEQ ID NO: 84936 - DNA, 40 bp, Homo sapiens
tgtaattatgtaaatacaatttgtacttttttcttaaggc

SEQ ID NO: 84937 - DNA, 40 bp, Homo sapiens
gccttaagaaaaaagtacaaattgtatttacataattaca

SEQ ID NO: 84938 - DNA, 40 bp, Homo sapiens
gtaattatgtaaatacaatttgtacttttttcttaaggca

SEQ ID NO: 84939 - DNA, 40 bp, Homo sapiens
tgccttaagaaaaaagtacaaattgtatttacataattac

SEQ ID NO: 84940 - DNA, 40 bp, Homo sapiens
taattatgtaaatacaatttgtacttttttcttaaggcat

SEQ ID NO: 84941 - DNA, 40 bp, Homo sapiens
atgccttaagaaaaaagtacaaattgtatttacataatta

SEQ ID NO: 84942 - DNA, 40 bp, Homo sapiens
aattatgtaaatacaatttgtacttttttcttaaggcata

SEQ ID NO: 84943 - DNA, 40 bp, Homo sapiens
tatgccttaagaaaaaagtacaaattgtatttacataatt

SEQ ID NO: 84944 - DNA, 40 bp, Homo sapiens
attatgtaaatacaatttgtacttttttcttaaggcatac

SEQ ID NO: 84945 - DNA, 40 bp, Homo sapiens
gtatgccttaagaaaaaagtacaaattgtatttacataat

SEQ ID NO: 84946 - DNA, 40 bp, Homo sapiens
ttatgtaaatacaatttgtacttttttcttaaggcatact

SEQ ID NO: 84947 - DNA, 40 bp, Homo sapiens
agtatgccttaagaaaaaagtacaaattgtatttacataa

SEQ ID NO: 84948 - DNA, 40 bp, Homo sapiens
tatgtaaatacaatttgtacttttttcttaaggcatacta

SEQ ID NO: 84949 - DNA, 40 bp, Homo sapiens
tagtatgccttaagaaaaaagtacaaattgtatttacata

SEQ ID NO: 84950 - DNA, 40 bp, Homo sapiens
atgtaaatacaatttgtacttttttcttaaggcatactag

SEQ ID NO: 84951 - DNA, 40 bp, Homo sapiens
ctagtatgccttaagaaaaaagtacaaattgtatttacat

SEQ ID NO: 84952 - DNA, 40 bp, Homo sapiens
tgtaaatacaatttgtacttttttcttaaggcatactagt

SEQ ID NO: 84953 - DNA, 40 bp, Homo sapiens
actagtatgccttaagaaaaaagtacaaattgtatttaca

SEQ ID NO: 84954 - DNA, 40 bp, Homo sapiens
gtaaatacaatttgtacttttttcttaaggcatactagta

SEQ ID NO: 84955 - DNA, 40 bp, Homo sapiens
tactagtatgccttaagaaaaaagtacaaattgtatttac

SEQ ID NO: 84956 - DNA, 40 bp, Homo sapiens
taaatacaatttgtacttttttcttaaggcatactagtac

SEQ ID NO: 84957 - DNA, 40 bp, Homo sapiens
gtactagtatgccttaagaaaaaagtacaaattgtattta

SEQ ID NO: 84958 - DNA, 40 bp, Homo sapiens
aaatacaatttgtacttttttcttaaggcatactagtaca

SEQ ID NO: 84959 - DNA, 40 bp, Homo sapiens
tgtactagtatgccttaagaaaaaagtacaaattgtattt

SEQ ID NO: 84960 - DNA, 40 bp, Homo sapiens
aatacaatttgtacttttttcttaaggcatactagtacaa

SEQ ID NO: 84961 - DNA, 40 bp, Homo sapiens
ttgtactagtatgccttaagaaaaaagtacaaattgtatt

SEQ ID NO: 84962 - DNA, 40 bp, Homo sapiens
atacaatttgtacttttttcttaaggcatactagtacaag

SEQ ID NO: 84963 - DNA, 40 bp, Homo sapiens
cttgtactagtatgccttaagaaaaaagtacaaattgtat

SEQ ID NO: 84964 - DNA, 40 bp, Homo sapiens
tacaatttgtacttttttcttaaggcatactagtacaagt

SEQ ID NO: 84965 - DNA, 40 bp, Homo sapiens
acttgtactagtatgccttaagaaaaaagtacaaattgta

SEQ ID NO: 84966 - DNA, 40 bp, Homo sapiens
acaatttgtacttttttcttaaggcatactagtacaagtg

SEQ ID NO: 84967 - DNA, 40 bp, Homo sapiens
cacttgtactagtatgccttaagaaaaaagtacaaattgt

SEQ ID NO: 84968 - DNA, 40 bp, Homo sapiens
caatttgtacttttttcttaaggcatactagtacaagtgg

SEQ ID NO: 84969 - DNA, 40 bp, Homo sapiens
ccacttgtactagtatgccttaagaaaaaagtacaaattg

SEQ ID NO: 84970 - DNA, 40 bp, Homo sapiens
aatttgtacttttttcttaaggcatactagtacaagtggt

SEQ ID NO: 84971 - DNA, 40 bp, Homo sapiens
accacttgtactagtatgccttaagaaaaaagtacaaatt

SEQ ID NO: 84972 - DNA, 40 bp, Homo sapiens
atttgtacttttttcttaaggcatactagtacaagtggta

SEQ ID NO: 84973 - DNA, 40 bp, Homo sapiens
taccacttgtactagtatgccttaagaaaaaagtacaaat

SEQ ID NO: 84974 - DNA, 40 bp, Homo sapiens
tttgtacttttttcttaaggcatactagtacaagtggtaa

SEQ ID NO: 84975 - DNA, 40 bp, Homo sapiens
ttaccacttgtactagtatgccttaagaaaaaagtacaaa

SEQ ID NO: 84976 - DNA, 40 bp, Homo sapiens
ttgtacttttttcttaaggcatactagtacaagtggtaat

SEQ ID NO: 84977 - DNA, 40 bp, Homo sapiens
attaccacttgtactagtatgccttaagaaaaaagtacaa

SEQ ID NO: 84978 - DNA, 40 bp, Homo sapiens
tgtacttttttcttaaggcatactagtacaagtggtaatt

SEQ ID NO: 84979 - DNA, 40 bp, Homo sapiens
aattaccacttgtactagtatgccttaagaaaaaagtaca

SEQ ID NO: 84980 - DNA, 40 bp, Homo sapiens
gtacttttttcttaaggcatactagtacaagtggtaattt

SEQ ID NO: 84981 - DNA, 40 bp, Homo sapiens
aaattaccacttgtactagtatgccttaagaaaaaagtac

SEQ ID NO: 84982 - DNA, 40 bp, Homo sapiens
tacttttttcttaaggcatactagtacaagtggtaatttt

SEQ ID NO: 84983 - DNA, 40 bp, Homo sapiens
aaaattaccacttgtactagtatgccttaagaaaaaagta

SEQ ID NO: 84984 - DNA, 40 bp, Homo sapiens
acttttttcttaaggcatactagtacaagtggtaattttt

SEQ ID NO: 84985 - DNA, 40 bp, Homo sapiens
aaaaattaccacttgtactagtatgccttaagaaaaaagt

SEQ ID NO: 84986 - DNA, 40 bp, Homo sapiens
cttttttcttaaggcatactagtacaagtggtaatttttg

SEQ ID NO: 84987 - DNA, 40 bp, Homo sapiens
caaaaattaccacttgtactagtatgccttaagaaaaaag

SEQ ID NO: 84988 - DNA, 40 bp, Homo sapiens
ttttttcttaaggcatactagtacaagtggtaatttttgt

SEQ ID NO: 84989 - DNA, 40 bp, Homo sapiens
acaaaaattaccacttgtactagtatgccttaagaaaaaa

SEQ ID NO: 84990 - DNA, 40 bp, Homo sapiens
tttttcttaaggcatactagtacaagtggtaatttttgta

SEQ ID NO: 84991 - DNA, 40 bp, Homo sapiens
tacaaaaattaccacttgtactagtatgccttaagaaaaa

SEQ ID NO: 84992 - DNA, 40 bp, Homo sapiens
ttttcttaaggcatactagtacaagtggtaatttttgtac

SEQ ID NO: 84993 - DNA, 40 bp, Homo sapiens
gtacaaaaattaccacttgtactagtatgccttaagaaaa

SEQ ID NO: 84994 - DNA, 40 bp, Homo sapiens
tttcttaaggcatactagtacaagtggtaatttttgtaca

SEQ ID NO: 84995 - DNA, 40 bp, Homo sapiens
tgtacaaaaattaccacttgtactagtatgccttaagaaa

SEQ ID NO: 84996 - DNA, 40 bp, Homo sapiens
ttcttaaggcatactagtacaagtggtaatttttgtacat

SEQ ID NO: 84997 - DNA, 40 bp, Homo sapiens
atgtacaaaaattaccacttgtactagtatgccttaagaa

SEQ ID NO: 84998 - DNA, 40 bp, Homo sapiens
tcttaaggcatactagtacaagtggtaatttttgtacatt

SEQ ID NO: 84999 - DNA, 40 bp, Homo sapiens
aatgtacaaaaattaccacttgtactagtatgccttaaga

SEQ ID NO: 85000 - DNA, 40 bp, Homo sapiens
cttaaggcatactagtacaagtggtaatttttgtacatta

SEQ ID NO: 85001 - DNA, 40 bp, Homo sapiens
taatgtacaaaaattaccacttgtactagtatgccttaag

SEQ ID NO: 85002 - DNA, 40 bp, Homo sapiens
ttaaggcatactagtacaagtggtaatttttgtacattac

SEQ ID NO: 85003 - DNA, 40 bp, Homo sapiens
gtaatgtacaaaaattaccacttgtactagtatgccttaa

SEQ ID NO: 85004 - DNA, 40 bp, Homo sapiens
taaggcatactagtacaagtggtaatttttgtacattaca

SEQ ID NO: 85005 - DNA, 40 bp, Homo sapiens
tgtaatgtacaaaaattaccacttgtactagtatgcctta

SEQ ID NO: 85006 - DNA, 40 bp, Homo sapiens
aaggcatactagtacaagtggtaatttttgtacattacac

SEQ ID NO: 85007 - DNA, 40 bp, Homo sapiens
gtgtaatgtacaaaaattaccacttgtactagtatgcctt

SEQ ID NO: 85008 - DNA, 40 bp, Homo sapiens
aggcatactagtacaagtggtaatttttgtacattacact

SEQ ID NO: 85009 - DNA, 40 bp, Homo sapiens
agtgtaatgtacaaaaattaccacttgtactagtatgcct

SEQ ID NO: 85010 - DNA, 40 bp, Homo sapiens
ggcatactagtacaagtggtaatttttgtacattacacta

SEQ ID NO: 85011 - DNA, 40 bp, Homo sapiens
tagtgtaatgtacaaaaattaccacttgtactagtatgcc

SEQ ID NO: 85012 - DNA, 40 bp, Homo sapiens
gcatactagtacaagtggtaatttttgtacattacactaa

SEQ ID NO: 85013 - DNA, 40 bp, Homo sapiens
ttagtgtaatgtacaaaaattaccacttgtactagtatgc

SEQ ID NO: 85014 - DNA, 40 bp, Homo sapiens
catactagtacaagtggtaatttttgtacattacactaaa

SEQ ID NO: 85015 - DNA, 40 bp, Homo sapiens
tttagtgtaatgtacaaaaattaccacttgtactagtatg

SEQ ID NO: 85016 - DNA, 40 bp, Homo sapiens
atactagtacaagtggtaatttttgtacattacactaaat

SEQ ID NO: 85017 - DNA, 40 bp, Homo sapiens
atttagtgtaatgtacaaaaattaccacttgtactagtat

SEQ ID NO: 85018 - DNA, 40 bp, Homo sapiens
tactagtacaagtggtaatttttgtacattacactaaatt

SEQ ID NO: 85019 - DNA, 40 bp, Homo sapiens
aatttagtgtaatgtacaaaaattaccacttgtactagta

SEQ ID NO: 85020 - DNA, 40 bp, Homo sapiens
actagtacaagtggtaatttttgtacattacactaaatta

SEQ ID NO: 85021 - DNA, 40 bp, Homo sapiens
taatttagtgtaatgtacaaaaattaccacttgtactagt

SEQ ID NO: 85022 - DNA, 40 bp, Homo sapiens
ctagtacaagtggtaatttttgtacattacactaaattat

SEQ ID NO: 85023 - DNA, 40 bp, Homo sapiens
ataatttagtgtaatgtacaaaaattaccacttgtactag

SEQ ID NO: 85024 - DNA, 40 bp, Homo sapiens
tagtacaagtggtaatttttgtacattacactaaattatt

SEQ ID NO: 85025 - DNA, 40 bp, Homo sapiens
aataatttagtgtaatgtacaaaaattaccacttgtacta

SEQ ID NO: 85026 - DNA, 40 bp, Homo sapiens
agtacaagtggtaatttttgtacattacactaaattatta

SEQ ID NO: 85027 - DNA, 40 bp, Homo sapiens
taataatttagtgtaatgtacaaaaattaccacttgtact

SEQ ID NO: 85028 - DNA, 40 bp, Homo sapiens
gtacaagtggtaatttttgtacattacactaaattattag

SEQ ID NO: 85029 - DNA, 40 bp, Homo sapiens
ctaataatttagtgtaatgtacaaaaattaccacttgtac

SEQ ID NO: 85030 - DNA, 40 bp, Homo sapiens
tacaagtggtaatttttgtacattacactaaattattagc

SEQ ID NO: 85031 - DNA, 40 bp, Homo sapiens
gctaataatttagtgtaatgtacaaaaattaccacttgta

SEQ ID NO: 85032 - DNA, 40 bp, Homo sapiens
acaagtggtaatttttgtacattacactaaattattagca

SEQ ID NO: 85033 - DNA, 40 bp, Homo sapiens
tgctaataatttagtgtaatgtacaaaaattaccacttgt

SEQ ID NO: 85034 - DNA, 40 bp, Homo sapiens
caagtggtaatttttgtacattacactaaattattagcat

SEQ ID NO: 85035 - DNA, 40 bp, Homo sapiens
atgctaataatttagtgtaatgtacaaaaattaccacttg

SEQ ID NO: 85036 - DNA, 40 bp, Homo sapiens
aagtggtaatttttgtacattacactaaattattagcatt

SEQ ID NO: 85037 - DNA, 40 bp, Homo sapiens
aatgctaataatttagtgtaatgtacaaaaattaccactt

SEQ ID NO: 85038 - DNA, 40 bp, Homo sapiens
agtggtaatttttgtacattacactaaattattagcattt

SEQ ID NO: 85039 - DNA, 40 bp, Homo sapiens
aaatgctaataatttagtgtaatgtacaaaaattaccact

SEQ ID NO: 85040 - DNA, 40 bp, Homo sapiens
gtggtaatttttgtacattacactaaattattagcatttg

SEQ ID NO: 85041 - DNA, 40 bp, Homo sapiens
caaatgctaataatttagtgtaatgtacaaaaattaccac

SEQ ID NO: 85042 - DNA, 40 bp, Homo sapiens
tggtaatttttgtacattacactaaattattagcatttgt

SEQ ID NO: 85043 - DNA, 40 bp, Homo sapiens
acaaatgctaataatttagtgtaatgtacaaaaattacca

SEQ ID NO: 85044 - DNA, 40 bp, Homo sapiens
ggtaatttttgtacattacactaaattattagcatttgtt

SEQ ID NO: 85045 - DNA, 40 bp, Homo sapiens
aacaaatgctaataatttagtgtaatgtacaaaaattacc

SEQ ID NO: 85046 - DNA, 40 bp, Homo sapiens
gtaatttttgtacattacactaaattattagcatttgttt

SEQ ID NO: 85047 - DNA, 40 bp, Homo sapiens
aaacaaatgctaataatttagtgtaatgtacaaaaattac

SEQ ID NO: 85048 - DNA, 40 bp, Homo sapiens
taatttttgtacattacactaaattattagcatttgtttt

SEQ ID NO: 85049 - DNA, 40 bp, Homo sapiens
aaaacaaatgctaataatttagtgtaatgtacaaaaatta

SEQ ID NO: 85050 - DNA, 40 bp, Homo sapiens
aatttttgtacattacactaaattattagcatttgtttta

SEQ ID NO: 85051 - DNA, 40 bp, Homo sapiens
taaaacaaatgctaataatttagtgtaatgtacaaaaatt

SEQ ID NO: 85052 - DNA, 40 bp, Homo sapiens
atttttgtacattacactaaattattagcatttgttttag

SEQ ID NO: 85053 - DNA, 40 bp, Homo sapiens
ctaaaacaaatgctaataatttagtgtaatgtacaaaaat

SEQ ID NO: 85054 - DNA, 40 bp, Homo sapiens
tttttgtacattacactaaattattagcatttgttttagc

SEQ ID NO: 85055 - DNA, 40 bp, Homo sapiens
gctaaaacaaatgctaataatttagtgtaatgtacaaaaa

SEQ ID NO: 85056 - DNA, 40 bp, Homo sapiens
ttttgtacattacactaaattattagcatttgttttagca

SEQ ID NO: 85057 - DNA, 40 bp, Homo sapiens
tgctaaaacaaatgctaataatttagtgtaatgtacaaaa

SEQ ID NO: 85058 - DNA, 40 bp, Homo sapiens
tttgtacattacactaaattattagcatttgttttagcat

SEQ ID NO: 85059 - DNA, 40 bp, Homo sapiens
atgctaaaacaaatgctaataatttagtgtaatgtacaaa

SEQ ID NO: 85060 - DNA, 40 bp, Homo sapiens
ttgtacattacactaaattattagcatttgttttagcatt

SEQ ID NO: 85061 - DNA, 40 bp, Homo sapiens
aatgctaaaacaaatgctaataatttagtgtaatgtacaa

SEQ ID NO: 85062 - DNA, 40 bp, Homo sapiens
tgtacattacactaaattattagcatttgttttagcatta

SEQ ID NO: 85063 - DNA, 40 bp, Homo sapiens
taatgctaaaacaaatgctaataatttagtgtaatgtaca

SEQ ID NO: 85064 - DNA, 40 bp, Homo sapiens
gtacattacactaaattattagcatttgttttagcattac

SEQ ID NO: 85065 - DNA, 40 bp, Homo sapiens
gtaatgctaaaacaaatgctaataatttagtgtaatgtac

SEQ ID NO: 85066 - DNA, 40 bp, Homo sapiens
tacattacactaaattattagcatttgttttagcattacc

SEQ ID NO: 85067 - DNA, 40 bp, Homo sapiens
ggtaatgctaaaacaaatgctaataatttagtgtaatgta

SEQ ID NO: 85068 - DNA, 40 bp, Homo sapiens
acattacactaaattattagcatttgttttagcattacct

SEQ ID NO: 85069 - DNA, 40 bp, Homo sapiens
aggtaatgctaaaacaaatgctaataatttagtgtaatgt

SEQ ID NO: 85070 - DNA, 40 bp, Homo sapiens
cattacactaaattattagcatttgttttagcattaccta

SEQ ID NO: 85071 - DNA, 40 bp, Homo sapiens
taggtaatgctaaaacaaatgctaataatttagtgtaatg

SEQ ID NO: 85072 - DNA, 40 bp, Homo sapiens
attacactaaattattagcatttgttttagcattacctaa

SEQ ID NO: 85073 - DNA, 40 bp, Homo sapiens
ttaggtaatgctaaaacaaatgctaataatttagtgtaat

SEQ ID NO: 85074 - DNA, 40 bp, Homo sapiens
ttacactaaattattagcatttgttttagcattacctaat

SEQ ID NO: 85075 - DNA, 40 bp, Homo sapiens
attaggtaatgctaaaacaaatgctaataatttagtgtaa

SEQ ID NO: 85076 - DNA, 40 bp, Homo sapiens
tacactaaattattagcatttgttttagcattacctaatt

SEQ ID NO: 85077 - DNA, 40 bp, Homo sapiens
aattaggtaatgctaaaacaaatgctaataatttagtgta

SEQ ID NO: 85078 - DNA, 40 bp, Homo sapiens
acactaaattattagcatttgttttagcattacctaattt

SEQ ID NO: 85079 - DNA, 40 bp, Homo sapiens
aaattaggtaatgctaaaacaaatgctaataatttagtgt

SEQ ID NO: 85080 - DNA, 40 bp, Homo sapiens
cactaaattattagcatttgttttagcattacctaatttt

SEQ ID NO: 85081 - DNA, 40 bp, Homo sapiens
aaaattaggtaatgctaaaacaaatgctaataatttagtg

SEQ ID NO: 85082 - DNA, 40 bp, Homo sapiens
actaaattattagcatttgttttagcattacctaattttt

SEQ ID NO: 85083 - DNA, 40 bp, Homo sapiens
aaaaattaggtaatgctaaaacaaatgctaataatttagt

SEQ ID NO: 85084 - DNA, 40 bp, Homo sapiens
ctaaattattagcatttgttttagcattacctaatttttt

SEQ ID NO: 85085 - DNA, 40 bp, Homo sapiens
aaaaaattaggtaatgctaaaacaaatgctaataatttag

SEQ ID NO: 85086 - DNA, 40 bp, Homo sapiens
taaattattagcatttgttttagcattacctaattttttt

SEQ ID NO: 85087 - DNA, 40 bp, Homo sapiens
aaaaaaattaggtaatgctaaaacaaatgctaataattta

SEQ ID NO: 85088 - DNA, 40 bp, Homo sapiens
aaattattagcatttgttttagcattacctaatttttttc

SEQ ID NO: 85089 - DNA, 40 bp, Homo sapiens
gaaaaaaattaggtaatgctaaaacaaatgctaataattt

SEQ ID NO: 85090 - DNA, 40 bp, Homo sapiens
aattattagcatttgttttagcattacctaatttttttcc

SEQ ID NO: 85091 - DNA, 40 bp, Homo sapiens
ggaaaaaaattaggtaatgctaaaacaaatgctaataatt

SEQ ID NO: 85092 - DNA, 40 bp, Homo sapiens
attattagcatttgttttagcattacctaatttttttcct

SEQ ID NO: 85093 - DNA, 40 bp, Homo sapiens
aggaaaaaaattaggtaatgctaaaacaaatgctaataat

SEQ ID NO: 85094 - DNA, 40 bp, Homo sapiens
ttattagcatttgttttagcattacctaatttttttcctg

SEQ ID NO: 85095 - DNA, 40 bp, Homo sapiens
caggaaaaaaattaggtaatgctaaaacaaatgctaataa

SEQ ID NO: 85096 - DNA, 40 bp, Homo sapiens
tattagcatttgttttagcattacctaatttttttcctgc

SEQ ID NO: 85097 - DNA, 40 bp, Homo sapiens
gcaggaaaaaaattaggtaatgctaaaacaaatgctaata

SEQ ID NO: 85098 - DNA, 40 bp, Homo sapiens
attagcatttgttttagcattacctaatttttttcctgct

SEQ ID NO: 85099 - DNA, 40 bp, Homo sapiens
agcaggaaaaaaattaggtaatgctaaaacaaatgctaat

SEQ ID NO: 85100 - DNA, 40 bp, Homo sapiens
ttagcatttgttttagcattacctaatttttttcctgctc

SEQ ID NO: 85101 - DNA, 40 bp, Homo sapiens
gagcaggaaaaaaattaggtaatgctaaaacaaatgctaa

SEQ ID NO: 85102 - DNA, 40 bp, Homo sapiens
tagcatttgttttagcattacctaatttttttcctgctcc

SEQ ID NO: 85103 - DNA, 40 bp, Homo sapiens
ggagcaggaaaaaaattaggtaatgctaaaacaaatgcta

SEQ ID NO: 85104 - DNA, 40 bp, Homo sapiens
agcatttgttttagcattacctaatttttttcctgctcca

SEQ ID NO: 85105 - DNA, 40 bp, Homo sapiens
tggagcaggaaaaaaattaggtaatgctaaaacaaatgct

SEQ ID NO: 85106 - DNA, 40 bp, Homo sapiens
gcatttgttttagcattacctaatttttttcctgctccat

SEQ ID NO: 85107 - DNA, 40 bp, Homo sapiens
atggagcaggaaaaaaattaggtaatgctaaaacaaatgc

SEQ ID NO: 85108 - DNA, 40 bp, Homo sapiens
catttgttttagcattacctaatttttttcctgctccatg

SEQ ID NO: 85109 - DNA, 40 bp, Homo sapiens
catggagcaggaaaaaaattaggtaatgctaaaacaaatg

SEQ ID NO: 85110 - DNA, 40 bp, Homo sapiens
atttgttttagcattacctaatttttttcctgctccatgc

SEQ ID NO: 85111 - DNA, 40 bp, Homo sapiens
gcatggagcaggaaaaaaattaggtaatgctaaaacaaat

SEQ ID NO: 85112 - DNA, 40 bp, Homo sapiens
tttgttttagcattacctaatttttttcctgctccatgca

SEQ ID NO: 85113 - DNA, 40 bp, Homo sapiens
tgcatggagcaggaaaaaaattaggtaatgctaaaacaaa

SEQ ID NO: 85114 - DNA, 40 bp, Homo sapiens
ttgttttagcattacctaatttttttcctgctccatgcag

SEQ ID NO: 85115 - DNA, 40 bp, Homo sapiens
ctgcatggagcaggaaaaaaattaggtaatgctaaaacaa

SEQ ID NO: 85116 - DNA, 40 bp, Homo sapiens
tgttttagcattacctaatttttttcctgctccatgcaga

SEQ ID NO: 85117 - DNA, 40 bp, Homo sapiens
tctgcatggagcaggaaaaaaattaggtaatgctaaaaca

SEQ ID NO: 85118 - DNA, 40 bp, Homo sapiens
gttttagcattacctaatttttttcctgctccatgcagac

SEQ ID NO: 85119 - DNA, 40 bp, Homo sapiens
gtctgcatggagcaggaaaaaaattaggtaatgctaaaac

SEQ ID NO: 85120 - DNA, 40 bp, Homo sapiens
ttttagcattacctaatttttttcctgctccatgcagact

SEQ ID NO: 85121 - DNA, 40 bp, Homo sapiens
agtctgcatggagcaggaaaaaaattaggtaatgctaaaa

SEQ ID NO: 85122 - DNA, 40 bp, Homo sapiens
tttagcattacctaatttttttcctgctccatgcagactg

SEQ ID NO: 85123 - DNA, 40 bp, Homo sapiens
cagtctgcatggagcaggaaaaaaattaggtaatgctaaa

SEQ ID NO: 85124 - DNA, 40 bp, Homo sapiens
ttagcattacctaatttttttcctgctccatgcagactgt

SEQ ID NO: 85125 - DNA, 40 bp, Homo sapiens
acagtctgcatggagcaggaaaaaaattaggtaatgctaa

SEQ ID NO: 85126 - DNA, 40 bp, Homo sapiens
tagcattacctaatttttttcctgctccatgcagactgtt

SEQ ID NO: 85127 - DNA, 40 bp, Homo sapiens
aacagtctgcatggagcaggaaaaaaattaggtaatgcta

SEQ ID NO: 85128 - DNA, 40 bp, Homo sapiens
agcattacctaatttttttcctgctccatgcagactgtta

SEQ ID NO: 85129 - DNA, 40 bp, Homo sapiens
taacagtctgcatggagcaggaaaaaaattaggtaatgct

SEQ ID NO: 85130 - DNA, 40 bp, Homo sapiens
gcattacctaatttttttcctgctccatgcagactgttag

SEQ ID NO: 85131 - DNA, 40 bp, Homo sapiens
ctaacagtctgcatggagcaggaaaaaaattaggtaatgc

SEQ ID NO: 85132 - DNA, 40 bp, Homo sapiens
cattacctaatttttttcctgctccatgcagactgttagc

SEQ ID NO: 85133 - DNA, 40 bp, Homo sapiens
gctaacagtctgcatggagcaggaaaaaaattaggtaatg

SEQ ID NO: 85134 - DNA, 40 bp, Homo sapiens
attacctaatttttttcctgctccatgcagactgttagct

SEQ ID NO: 85135 - DNA, 40 bp, Homo sapiens
agctaacagtctgcatggagcaggaaaaaaattaggtaat

SEQ ID NO: 85136 - DNA, 40 bp, Homo sapiens
ttacctaatttttttcctgctccatgcagactgttagctt

SEQ ID NO: 85137 - DNA, 40 bp, Homo sapiens
aagctaacagtctgcatggagcaggaaaaaaattaggtaa

SEQ ID NO: 85138 - DNA, 40 bp, Homo sapiens
tacctaatttttttcctgctccatgcagactgttagcttt

SEQ ID NO: 85139 - DNA, 40 bp, Homo sapiens
aaagctaacagtctgcatggagcaggaaaaaaattaggta

SEQ ID NO: 85140 - DNA, 40 bp, Homo sapiens
acctaatttttttcctgctccatgcagactgttagctttt

SEQ ID NO: 85141 - DNA, 40 bp, Homo sapiens
aaaagctaacagtctgcatggagcaggaaaaaaattaggt

SEQ ID NO: 85142 - DNA, 40 bp, Homo sapiens
cctaatttttttcctgctccatgcagactgttagctttta

SEQ ID NO: 85143 - DNA, 40 bp, Homo sapiens
taaaagctaacagtctgcatggagcaggaaaaaaattagg

SEQ ID NO: 85144 - DNA, 40 bp, Homo sapiens
ctaatttttttcctgctccatgcagactgttagcttttac

SEQ ID NO: 85145 - DNA, 40 bp, Homo sapiens
gtaaaagctaacagtctgcatggagcaggaaaaaaattag

SEQ ID NO: 85146 - DNA, 40 bp, Homo sapiens
taatttttttcctgctccatgcagactgttagcttttacc

SEQ ID NO: 85147 - DNA, 40 bp, Homo sapiens
ggtaaaagctaacagtctgcatggagcaggaaaaaaatta

SEQ ID NO: 85148 - DNA, 40 bp, Homo sapiens
aatttttttcctgctccatgcagactgttagcttttacct

SEQ ID NO: 85149 - DNA, 40 bp, Homo sapiens
aggtaaaagctaacagtctgcatggagcaggaaaaaaatt

SEQ ID NO: 85150 - DNA, 40 bp, Homo sapiens
atttttttcctgctccatgcagactgttagcttttacctt

SEQ ID NO: 85151 - DNA, 40 bp, Homo sapiens
aaggtaaaagctaacagtctgcatggagcaggaaaaaaat

SEQ ID NO: 85152 - DNA, 40 bp, Homo sapiens
tttttttcctgctccatgcagactgttagcttttacctta

SEQ ID NO: 85153 - DNA, 40 bp, Homo sapiens
taaggtaaaagctaacagtctgcatggagcaggaaaaaaa

SEQ ID NO: 85154 - DNA, 40 bp, Homo sapiens
ttttttcctgctccatgcagactgttagcttttaccttaa

SEQ ID NO: 85155 - DNA, 40 bp, Homo sapiens
ttaaggtaaaagctaacagtctgcatggagcaggaaaaaa

SEQ ID NO: 85156 - DNA, 40 bp, Homo sapiens
tttttcctgctccatgcagactgttagcttttaccttaaa

SEQ ID NO: 85157 - DNA, 40 bp, Homo sapiens
tttaaggtaaaagctaacagtctgcatggagcaggaaaaa

SEQ ID NO: 85158 - DNA, 40 bp, Homo sapiens
ttttcctgctccatgcagactgttagcttttaccttaaat

SEQ ID NO: 85159 - DNA, 40 bp, Homo sapiens
atttaaggtaaaagctaacagtctgcatggagcaggaaaa

SEQ ID NO: 85160 - DNA, 40 bp, Homo sapiens
tttcctgctccatgcagactgttagcttttaccttaaatg

SEQ ID NO: 85161 - DNA, 40 bp, Homo sapiens
catttaaggtaaaagctaacagtctgcatggagcaggaaa

SEQ ID NO: 85162 - DNA, 40 bp, Homo sapiens
ttcctgctccatgcagactgttagcttttaccttaaatgc

SEQ ID NO: 85163 - DNA, 40 bp, Homo sapiens
gcatttaaggtaaaagctaacagtctgcatggagcaggaa

SEQ ID NO: 85164 - DNA, 40 bp, Homo sapiens
tcctgctccatgcagactgttagcttttaccttaaatgct

SEQ ID NO: 85165 - DNA, 40 bp, Homo sapiens
agcatttaaggtaaaagctaacagtctgcatggagcagga

SEQ ID NO: 85166 - DNA, 40 bp, Homo sapiens
cctgctccatgcagactgttagcttttaccttaaatgctt

SEQ ID NO: 85167 - DNA, 40 bp, Homo sapiens
aagcatttaaggtaaaagctaacagtctgcatggagcagg

SEQ ID NO: 85168 - DNA, 40 bp, Homo sapiens
ctgctccatgcagactgttagcttttaccttaaatgctta

SEQ ID NO: 85169 - DNA, 40 bp, Homo sapiens
taagcatttaaggtaaaagctaacagtctgcatggagcag

SEQ ID NO: 85170 - DNA, 40 bp, Homo sapiens
tgctccatgcagactgttagcttttaccttaaatgcttat

SEQ ID NO: 85171 - DNA, 40 bp, Homo sapiens
ataagcatttaaggtaaaagctaacagtctgcatggagca

SEQ ID NO: 85172 - DNA, 40 bp, Homo sapiens
gctccatgcagactgttagcttttaccttaaatgcttatt

SEQ ID NO: 85173 - DNA, 40 bp, Homo sapiens
aataagcatttaaggtaaaagctaacagtctgcatggagc

SEQ ID NO: 85174 - DNA, 40 bp, Homo sapiens
ctccatgcagactgttagcttttaccttaaatgcttattt

SEQ ID NO: 85175 - DNA, 40 bp, Homo sapiens
aaataagcatttaaggtaaaagctaacagtctgcatggag

SEQ ID NO: 85176 - DNA, 40 bp, Homo sapiens
tccatgcagactgttagcttttaccttaaatgcttatttt

SEQ ID NO: 85177 - DNA, 40 bp, Homo sapiens
aaaataagcatttaaggtaaaagctaacagtctgcatgga

SEQ ID NO: 85178 - DNA, 40 bp, Homo sapiens
ccatgcagactgttagcttttaccttaaatgcttatttta

SEQ ID NO: 85179 - DNA, 40 bp, Homo sapiens
taaaataagcatttaaggtaaaagctaacagtctgcatgg

SEQ ID NO: 85180 - DNA, 40 bp, Homo sapiens
catgcagactgttagcttttaccttaaatgcttattttaa

SEQ ID NO: 85181 - DNA, 40 bp, Homo sapiens
ttaaaataagcatttaaggtaaaagctaacagtctgcatg

SEQ ID NO: 85182 - DNA, 40 bp, Homo sapiens
atgcagactgttagcttttaccttaaatgcttattttaaa

SEQ ID NO: 85183 - DNA, 40 bp, Homo sapiens
tttaaaataagcatttaaggtaaaagctaacagtctgcat

SEQ ID NO: 85184 - DNA, 40 bp, Homo sapiens
tgcagactgttagcttttaccttaaatgcttattttaaaa

SEQ ID NO: 85185 - DNA, 40 bp, Homo sapiens
ttttaaaataagcatttaaggtaaaagctaacagtctgca

SEQ ID NO: 85186 - DNA, 40 bp, Homo sapiens
gcagactgttagcttttaccttaaatgcttattttaaaat

SEQ ID NO: 85187 - DNA, 40 bp, Homo sapiens
attttaaaataagcatttaaggtaaaagctaacagtctgc

SEQ ID NO: 85188 - DNA, 40 bp, Homo sapiens
cagactgttagcttttaccttaaatgcttattttaaaatg

SEQ ID NO: 85189 - DNA, 40 bp, Homo sapiens
cattttaaaataagcatttaaggtaaaagctaacagtctg

SEQ ID NO: 85190 - DNA, 40 bp, Homo sapiens
agactgttagcttttaccttaaatgcttattttaaaatga

SEQ ID NO: 85191 - DNA, 40 bp, Homo sapiens
tcattttaaaataagcatttaaggtaaaagctaacagtct

SEQ ID NO: 85192 - DNA, 40 bp, Homo sapiens
gactgttagcttttaccttaaatgcttattttaaaatgac

SEQ ID NO: 85193 - DNA, 40 bp, Homo sapiens
gtcattttaaaataagcatttaaggtaaaagctaacagtc

SEQ ID NO: 85194 - DNA, 40 bp, Homo sapiens
actgttagcttttaccttaaatgcttattttaaaatgaca

SEQ ID NO: 85195 - DNA, 40 bp, Homo sapiens
tgtcattttaaaataagcatttaaggtaaaagctaacagt

SEQ ID NO: 85196 - DNA, 40 bp, Homo sapiens
ctgttagcttttaccttaaatgcttattttaaaatgacag

SEQ ID NO: 85197 - DNA, 40 bp, Homo sapiens
ctgtcattttaaaataagcatttaaggtaaaagctaacag

SEQ ID NO: 85198 - DNA, 40 bp, Homo sapiens
tgttagcttttaccttaaatgcttattttaaaatgacagt

SEQ ID NO: 85199 - DNA, 40 bp, Homo sapiens
actgtcattttaaaataagcatttaaggtaaaagctaaca

SEQ ID NO: 85200 - DNA, 40 bp, Homo sapiens
gttagcttttaccttaaatgcttattttaaaatgacagtg

SEQ ID NO: 85201 - DNA, 40 bp, Homo sapiens
cactgtcattttaaaataagcatttaaggtaaaagctaac

SEQ ID NO: 85202 - DNA, 40 bp, Homo sapiens
ttagcttttaccttaaatgcttattttaaaatgacagtgg

SEQ ID NO: 85203 - DNA, 40 bp, Homo sapiens
ccactgtcattttaaaataagcatttaaggtaaaagctaa

SEQ ID NO: 85204 - DNA, 40 bp, Homo sapiens
tagcttttaccttaaatgcttattttaaaatgacagtgga

SEQ ID NO: 85205 - DNA, 40 bp, Homo sapiens
tccactgtcattttaaaataagcatttaaggtaaaagcta

SEQ ID NO: 85206 - DNA, 40 bp, Homo sapiens
agcttttaccttaaatgcttattttaaaatgacagtggaa

SEQ ID NO: 85207 - DNA, 40 bp, Homo sapiens
ttccactgtcattttaaaataagcatttaaggtaaaagct

SEQ ID NO: 85208 - DNA, 40 bp, Homo sapiens
gcttttaccttaaatgcttattttaaaatgacagtggaag

SEQ ID NO: 85209 - DNA, 40 bp, Homo sapiens
cttccactgtcattttaaaataagcatttaaggtaaaagc

SEQ ID NO: 85210 - DNA, 40 bp, Homo sapiens
cttttaccttaaatgcttattttaaaatgacagtggaagt

SEQ ID NO: 85211 - DNA, 40 bp, Homo sapiens
acttccactgtcattttaaaataagcatttaaggtaaaag

SEQ ID NO: 85212 - DNA, 40 bp, Homo sapiens
ttttaccttaaatgcttattttaaaatgacagtggaagtt

SEQ ID NO: 85213 - DNA, 40 bp, Homo sapiens
aacttccactgtcattttaaaataagcatttaaggtaaaa

SEQ ID NO: 85214 - DNA, 40 bp, Homo sapiens
tttaccttaaatgcttattttaaaatgacagtggaagttt

SEQ ID NO: 85215 - DNA, 40 bp, Homo sapiens
aaacttccactgtcattttaaaataagcatttaaggtaaa

SEQ ID NO: 85216 - DNA, 40 bp, Homo sapiens
ttaccttaaatgcttattttaaaatgacagtggaagtttt

SEQ ID NO: 85217 - DNA, 40 bp, Homo sapiens
aaaacttccactgtcattttaaaataagcatttaaggtaa

SEQ ID NO: 85218 - DNA, 40 bp, Homo sapiens
taccttaaatgcttattttaaaatgacagtggaagttttt

SEQ ID NO: 85219 - DNA, 40 bp, Homo sapiens
aaaaacttccactgtcattttaaaataagcatttaaggta

SEQ ID NO: 85220 - DNA, 40 bp, Homo sapiens
accttaaatgcttattttaaaatgacagtggaagtttttt

SEQ ID NO: 85221 - DNA, 40 bp, Homo sapiens
aaaaaacttccactgtcattttaaaataagcatttaaggt

SEQ ID NO: 85222 - DNA, 40 bp, Homo sapiens
ccttaaatgcttattttaaaatgacagtggaagttttttt

SEQ ID NO: 85223 - DNA, 40 bp, Homo sapiens
aaaaaaacttccactgtcattttaaaataagcatttaagg

SEQ ID NO: 85224 - DNA, 40 bp, Homo sapiens
cttaaatgcttattttaaaatgacagtggaagtttttttt

SEQ ID NO: 85225 - DNA, 40 bp, Homo sapiens
aaaaaaaacttccactgtcattttaaaataagcatttaag

SEQ ID NO: 85226 - DNA, 40 bp, Homo sapiens
ttaaatgcttattttaaaatgacagtggaagttttttttt

SEQ ID NO: 85227 - DNA, 40 bp, Homo sapiens
aaaaaaaaacttccactgtcattttaaaataagcatttaa

SEQ ID NO: 85228 - DNA, 40 bp, Homo sapiens
taaatgcttattttaaaatgacagtggaagtttttttttc

SEQ ID NO: 85229 - DNA, 40 bp, Homo sapiens
gaaaaaaaaacttccactgtcattttaaaataagcattta

SEQ ID NO: 85230 - DNA, 40 bp, Homo sapiens
aaatgcttattttaaaatgacagtggaagtttttttttcc

SEQ ID NO: 85231 - DNA, 40 bp, Homo sapiens
ggaaaaaaaaacttccactgtcattttaaaataagcattt

SEQ ID NO: 85232 - DNA, 40 bp, Homo sapiens
aatgcttattttaaaatgacagtggaagtttttttttcct

SEQ ID NO: 85233 - DNA, 40 bp, Homo sapiens
aggaaaaaaaaacttccactgtcattttaaaataagcatt

SEQ ID NO: 85234 - DNA, 40 bp, Homo sapiens
atgcttattttaaaatgacagtggaagtttttttttcctc

SEQ ID NO: 85235 - DNA, 40 bp, Homo sapiens
gaggaaaaaaaaacttccactgtcattttaaaataagcat

SEQ ID NO: 85236 - DNA, 40 bp, Homo sapiens
tgcttattttaaaatgacagtggaagtttttttttcctct

SEQ ID NO: 85237 - DNA, 40 bp, Homo sapiens
agaggaaaaaaaaacttccactgtcattttaaaataagca

SEQ ID NO: 85238 - DNA, 40 bp, Homo sapiens
gcttattttaaaatgacagtggaagtttttttttcctcta

SEQ ID NO: 85239 - DNA, 40 bp, Homo sapiens
tagaggaaaaaaaaacttccactgtcattttaaaataagc

SEQ ID NO: 85240 - DNA, 40 bp, Homo sapiens
cttattttaaaatgacagtggaagtttttttttcctctaa

SEQ ID NO: 85241 - DNA, 40 bp, Homo sapiens
ttagaggaaaaaaaaacttccactgtcattttaaaataag

SEQ ID NO: 85242 - DNA, 40 bp, Homo sapiens
ttattttaaaatgacagtggaagtttttttttcctctaag

SEQ ID NO: 85243 - DNA, 40 bp, Homo sapiens
cttagaggaaaaaaaaacttccactgtcattttaaaataa

SEQ ID NO: 85244 - DNA, 40 bp, Homo sapiens
tattttaaaatgacagtggaagtttttttttcctctaagt

SEQ ID NO: 85245 - DNA, 40 bp, Homo sapiens
acttagaggaaaaaaaaacttccactgtcattttaaaata

SEQ ID NO: 85246 - DNA, 40 bp, Homo sapiens
attttaaaatgacagtggaagtttttttttcctctaagtg

SEQ ID NO: 85247 - DNA, 40 bp, Homo sapiens
cacttagaggaaaaaaaaacttccactgtcattttaaaat

SEQ ID NO: 85248 - DNA, 40 bp, Homo sapiens
ttttaaaatgacagtggaagtttttttttcctctaagtgc

SEQ ID NO: 85249 - DNA, 40 bp, Homo sapiens
gcacttagaggaaaaaaaaacttccactgtcattttaaaa

SEQ ID NO: 85250 - DNA, 40 bp, Homo sapiens
tttaaaatgacagtggaagtttttttttcctctaagtgcc

SEQ ID NO: 85251 - DNA, 40 bp, Homo sapiens
ggcacttagaggaaaaaaaaacttccactgtcattttaaa

SEQ ID NO: 85252 - DNA, 40 bp, Homo sapiens
ttaaaatgacagtggaagtttttttttcctctaagtgcca

SEQ ID NO: 85253 - DNA, 40 bp, Homo sapiens
tggcacttagaggaaaaaaaaacttccactgtcattttaa

SEQ ID NO: 85254 - DNA, 40 bp, Homo sapiens
taaaatgacagtggaagtttttttttcctctaagtgccag

SEQ ID NO: 85255 - DNA, 40 bp, Homo sapiens
ctggcacttagaggaaaaaaaaacttccactgtcatttta

SEQ ID NO: 85256 - DNA, 40 bp, Homo sapiens
aaaatgacagtggaagtttttttttcctctaagtgccagt

SEQ ID NO: 85257 - DNA, 40 bp, Homo sapiens
actggcacttagaggaaaaaaaaacttccactgtcatttt

SEQ ID NO: 85258 - DNA, 40 bp, Homo sapiens
aaatgacagtggaagtttttttttcctctaagtgccagta

SEQ ID NO: 85259 - DNA, 40 bp, Homo sapiens
tactggcacttagaggaaaaaaaaacttccactgtcattt

SEQ ID NO: 85260 - DNA, 40 bp, Homo sapiens
aatgacagtggaagtttttttttcctctaagtgccagtat

SEQ ID NO: 85261 - DNA, 40 bp, Homo sapiens
atactggcacttagaggaaaaaaaaacttccactgtcatt

SEQ ID NO: 85262 - DNA, 40 bp, Homo sapiens
atgacagtggaagtttttttttcctctaagtgccagtatt

SEQ ID NO: 85263 - DNA, 40 bp, Homo sapiens
aatactggcacttagaggaaaaaaaaacttccactgtcat

SEQ ID NO: 85264 - DNA, 40 bp, Homo sapiens
tgacagtggaagtttttttttcctctaagtgccagtattc

SEQ ID NO: 85265 - DNA, 40 bp, Homo sapiens
gaatactggcacttagaggaaaaaaaaacttccactgtca

SEQ ID NO: 85266 - DNA, 40 bp, Homo sapiens
gacagtggaagtttttttttcctctaagtgccagtattcc

SEQ ID NO: 85267 - DNA, 40 bp, Homo sapiens
ggaatactggcacttagaggaaaaaaaaacttccactgtc

SEQ ID NO: 85268 - DNA, 40 bp, Homo sapiens
acagtggaagtttttttttcctctaagtgccagtattccc

SEQ ID NO: 85269 - DNA, 40 bp, Homo sapiens
gggaatactggcacttagaggaaaaaaaaacttccactgt

SEQ ID NO: 85270 - DNA, 40 bp, Homo sapiens
cagtggaagtttttttttcctctaagtgccagtattccca

SEQ ID NO: 85271 - DNA, 40 bp, Homo sapiens
tgggaatactggcacttagaggaaaaaaaaacttccactg

SEQ ID NO: 85272 - DNA, 40 bp, Homo sapiens
agtggaagtttttttttcctctaagtgccagtattcccag

SEQ ID NO: 85273 - DNA, 40 bp, Homo sapiens
ctgggaatactggcacttagaggaaaaaaaaacttccact

SEQ ID NO: 85274 - DNA, 40 bp, Homo sapiens
gtggaagtttttttttcctctaagtgccagtattcccaga

SEQ ID NO: 85275 - DNA, 40 bp, Homo sapiens
tctgggaatactggcacttagaggaaaaaaaaacttccac

SEQ ID NO: 85276 - DNA, 40 bp, Homo sapiens
tggaagtttttttttcctctaagtgccagtattcccagag

SEQ ID NO: 85277 - DNA, 40 bp, Homo sapiens
ctctgggaatactggcacttagaggaaaaaaaaacttcca

SEQ ID NO: 85278 - DNA, 40 bp, Homo sapiens
ggaagtttttttttcctctaagtgccagtattcccagagt

SEQ ID NO: 85279 - DNA, 40 bp, Homo sapiens
actctgggaatactggcacttagaggaaaaaaaaacttcc

SEQ ID NO: 85280 - DNA, 40 bp, Homo sapiens
gaagtttttttttcctctaagtgccagtattcccagagtt

SEQ ID NO: 85281 - DNA, 40 bp, Homo sapiens
aactctgggaatactggcacttagaggaaaaaaaaacttc

SEQ ID NO: 85282 - DNA, 40 bp, Homo sapiens
aagtttttttttcctctaagtgccagtattcccagagttt

SEQ ID NO: 85283 - DNA, 40 bp, Homo sapiens
aaactctgggaatactggcacttagaggaaaaaaaaactt

SEQ ID NO: 85284 - DNA, 40 bp, Homo sapiens
agtttttttttcctctaagtgccagtattcccagagtttt

SEQ ID NO: 85285 - DNA, 40 bp, Homo sapiens
aaaactctgggaatactggcacttagaggaaaaaaaaact

SEQ ID NO: 85286 - DNA, 40 bp, Homo sapiens
gtttttttttcctctaagtgccagtattcccagagttttg

SEQ ID NO: 85287 - DNA, 40 bp, Homo sapiens
caaaactctgggaatactggcacttagaggaaaaaaaaac

SEQ ID NO: 85288 - DNA, 40 bp, Homo sapiens
tttttttttcctctaagtgccagtattcccagagttttgg

SEQ ID NO: 85289 - DNA, 40 bp, Homo sapiens
ccaaaactctgggaatactggcacttagaggaaaaaaaaa

SEQ ID NO: 85290 - DNA, 40 bp, Homo sapiens
ttttttttcctctaagtgccagtattcccagagttttggt

SEQ ID NO: 85291 - DNA, 40 bp, Homo sapiens
accaaaactctgggaatactggcacttagaggaaaaaaaa

SEQ ID NO: 85292 - DNA, 40 bp, Homo sapiens
tttttttcctctaagtgccagtattcccagagttttggtt

SEQ ID NO: 85293 - DNA, 40 bp, Homo sapiens
aaccaaaactctgggaatactggcacttagaggaaaaaaa

SEQ ID NO: 85294 - DNA, 40 bp, Homo sapiens
ttttttcctctaagtgccagtattcccagagttttggttt

SEQ ID NO: 85295 - DNA, 40 bp, Homo sapiens
aaaccaaaactctgggaatactggcacttagaggaaaaaa

SEQ ID NO: 85296 - DNA, 40 bp, Homo sapiens
tttttcctctaagtgccagtattcccagagttttggtttt

SEQ ID NO: 85297 - DNA, 40 bp, Homo sapiens
aaaaccaaaactctgggaatactggcacttagaggaaaaa

SEQ ID NO: 85298 - DNA, 40 bp, Homo sapiens
ttttcctctaagtgccagtattcccagagttttggttttt

SEQ ID NO: 85299 - DNA, 40 bp, Homo sapiens
aaaaaccaaaactctgggaatactggcacttagaggaaaa

SEQ ID NO: 85300 - DNA, 40 bp, Homo sapiens
tttcctctaagtgccagtattcccagagttttggtttttg

SEQ ID NO: 85301 - DNA, 40 bp, Homo sapiens
caaaaaccaaaactctgggaatactggcacttagaggaaa

SEQ ID NO: 85302 - DNA, 40 bp, Homo sapiens
ttcctctaagtgccagtattcccagagttttggtttttga

SEQ ID NO: 85303 - DNA, 40 bp, Homo sapiens
tcaaaaaccaaaactctgggaatactggcacttagaggaa

SEQ ID NO: 85304 - DNA, 40 bp, Homo sapiens
tcctctaagtgccagtattcccagagttttggtttttgaa

SEQ ID NO: 85305 - DNA, 40 bp, Homo sapiens
ttcaaaaaccaaaactctgggaatactggcacttagagga

SEQ ID NO: 85306 - DNA, 40 bp, Homo sapiens
cctctaagtgccagtattcccagagttttggtttttgaac

SEQ ID NO: 85307 - DNA, 40 bp, Homo sapiens
gttcaaaaaccaaaactctgggaatactggcacttagagg

SEQ ID NO: 85308 - DNA, 40 bp, Homo sapiens
ctctaagtgccagtattcccagagttttggtttttgaact

SEQ ID NO: 85309 - DNA, 40 bp, Homo sapiens
agttcaaaaaccaaaactctgggaatactggcacttagag

SEQ ID NO: 85310 - DNA, 40 bp, Homo sapiens
tctaagtgccagtattcccagagttttggtttttgaacta

SEQ ID NO: 85311 - DNA, 40 bp, Homo sapiens
tagttcaaaaaccaaaactctgggaatactggcacttaga

SEQ ID NO: 85312 - DNA, 40 bp, Homo sapiens
ctaagtgccagtattcccagagttttggtttttgaactag

SEQ ID NO: 85313 - DNA, 40 bp, Homo sapiens
ctagttcaaaaaccaaaactctgggaatactggcacttag

SEQ ID NO: 85314 - DNA, 40 bp, Homo sapiens
taagtgccagtattcccagagttttggtttttgaactagc

SEQ ID NO: 85315 - DNA, 40 bp, Homo sapiens
gctagttcaaaaaccaaaactctgggaatactggcactta

SEQ ID NO: 85316 - DNA, 40 bp, Homo sapiens
aagtgccagtattcccagagttttggtttttgaactagca

SEQ ID NO: 85317 - DNA, 40 bp, Homo sapiens
tgctagttcaaaaaccaaaactctgggaatactggcactt

SEQ ID NO: 85318 - DNA, 40 bp, Homo sapiens
agtgccagtattcccagagttttggtttttgaactagcaa

SEQ ID NO: 85319 - DNA, 40 bp, Homo sapiens
ttgctagttcaaaaaccaaaactctgggaatactggcact

SEQ ID NO: 85320 - DNA, 40 bp, Homo sapiens
gtgccagtattcccagagttttggtttttgaactagcaat

SEQ ID NO: 85321 - DNA, 40 bp, Homo sapiens
attgctagttcaaaaaccaaaactctgggaatactggcac

SEQ ID NO: 85322 - DNA, 40 bp, Homo sapiens
tgccagtattcccagagttttggtttttgaactagcaatg

SEQ ID NO: 85323 - DNA, 40 bp, Homo sapiens
cattgctagttcaaaaaccaaaactctgggaatactggca

SEQ ID NO: 85324 - DNA, 40 bp, Homo sapiens
gccagtattcccagagttttggtttttgaactagcaatgc

SEQ ID NO: 85325 - DNA, 40 bp, Homo sapiens
gcattgctagttcaaaaaccaaaactctgggaatactggc

SEQ ID NO: 85326 - DNA, 40 bp, Homo sapiens
ccagtattcccagagttttggtttttgaactagcaatgcc

SEQ ID NO: 85327 - DNA, 40 bp, Homo sapiens
ggcattgctagttcaaaaaccaaaactctgggaatactgg

SEQ ID NO: 85328 - DNA, 40 bp, Homo sapiens
cagtattcccagagttttggtttttgaactagcaatgcct

SEQ ID NO: 85329 - DNA, 40 bp, Homo sapiens
aggcattgctagttcaaaaaccaaaactctgggaatactg

SEQ ID NO: 85330 - DNA, 40 bp, Homo sapiens
agtattcccagagttttggtttttgaactagcaatgcctg

SEQ ID NO: 85331 - DNA, 40 bp, Homo sapiens
caggcattgctagttcaaaaaccaaaactctgggaatact

SEQ ID NO: 85332 - DNA, 40 bp, Homo sapiens
gtattcccagagttttggtttttgaactagcaatgcctgt

SEQ ID NO: 85333 - DNA, 40 bp, Homo sapiens
acaggcattgctagttcaaaaaccaaaactctgggaatac

SEQ ID NO: 85334 - DNA, 40 bp, Homo sapiens
tattcccagagttttggtttttgaactagcaatgcctgtg

SEQ ID NO: 85335 - DNA, 40 bp, Homo sapiens
cacaggcattgctagttcaaaaaccaaaactctgggaata

SEQ ID NO: 85336 - DNA, 40 bp, Homo sapiens
attcccagagttttggtttttgaactagcaatgcctgtga

SEQ ID NO: 85337 - DNA, 40 bp, Homo sapiens
tcacaggcattgctagttcaaaaaccaaaactctgggaat

SEQ ID NO: 85338 - DNA, 40 bp, Homo sapiens
ttcccagagttttggtttttgaactagcaatgcctgtgaa

SEQ ID NO: 85339 - DNA, 40 bp, Homo sapiens
ttcacaggcattgctagttcaaaaaccaaaactctgggaa

SEQ ID NO: 85340 - DNA, 40 bp, Homo sapiens
tcccagagttttggtttttgaactagcaatgcctgtgaaa

SEQ ID NO: 85341 - DNA, 40 bp, Homo sapiens
tttcacaggcattgctagttcaaaaaccaaaactctggga

SEQ ID NO: 85342 - DNA, 40 bp, Homo sapiens
cccagagttttggtttttgaactagcaatgcctgtgaaaa

SEQ ID NO: 85343 - DNA, 40 bp, Homo sapiens
ttttcacaggcattgctagttcaaaaaccaaaactctggg

SEQ ID NO: 85344 - DNA, 40 bp, Homo sapiens
ccagagttttggtttttgaactagcaatgcctgtgaaaaa

SEQ ID NO: 85345 - DNA, 40 bp, Homo sapiens
tttttcacaggcattgctagttcaaaaaccaaaactctgg

SEQ ID NO: 85346 - DNA, 40 bp, Homo sapiens
cagagttttggtttttgaactagcaatgcctgtgaaaaag

SEQ ID NO: 85347 - DNA, 40 bp, Homo sapiens
ctttttcacaggcattgctagttcaaaaaccaaaactctg

SEQ ID NO: 85348 - DNA, 40 bp, Homo sapiens
agagttttggtttttgaactagcaatgcctgtgaaaaaga

SEQ ID NO: 85349 - DNA, 40 bp, Homo sapiens
tctttttcacaggcattgctagttcaaaaaccaaaactct

SEQ ID NO: 85350 - DNA, 40 bp, Homo sapiens
gagttttggtttttgaactagcaatgcctgtgaaaaagaa

SEQ ID NO: 85351 - DNA, 40 bp, Homo sapiens
ttctttttcacaggcattgctagttcaaaaaccaaaactc

SEQ ID NO: 85352 - DNA, 40 bp, Homo sapiens
agttttggtttttgaactagcaatgcctgtgaaaaagaaa

SEQ ID NO: 85353 - DNA, 40 bp, Homo sapiens
tttctttttcacaggcattgctagttcaaaaaccaaaact

SEQ ID NO: 85354 - DNA, 40 bp, Homo sapiens
gttttggtttttgaactagcaatgcctgtgaaaaagaaac

SEQ ID NO: 85355 - DNA, 40 bp, Homo sapiens
gtttctttttcacaggcattgctagttcaaaaaccaaaac

SEQ ID NO: 85356 - DNA, 40 bp, Homo sapiens
ttttggtttttgaactagcaatgcctgtgaaaaagaaact

SEQ ID NO: 85357 - DNA, 40 bp, Homo sapiens
agtttctttttcacaggcattgctagttcaaaaaccaaaa

SEQ ID NO: 85358 - DNA, 40 bp, Homo sapiens
tttggtttttgaactagcaatgcctgtgaaaaagaaactg

SEQ ID NO: 85359 - DNA, 40 bp, Homo sapiens
cagtttctttttcacaggcattgctagttcaaaaaccaaa

SEQ ID NO: 85360 - DNA, 40 bp, Homo sapiens
ttggtttttgaactagcaatgcctgtgaaaaagaaactga

SEQ ID NO: 85361 - DNA, 40 bp, Homo sapiens
tcagtttctttttcacaggcattgctagttcaaaaaccaa

SEQ ID NO: 85362 - DNA, 40 bp, Homo sapiens
tggtttttgaactagcaatgcctgtgaaaaagaaactgaa

SEQ ID NO: 85363 - DNA, 40 bp, Homo sapiens
ttcagtttctttttcacaggcattgctagttcaaaaacca

SEQ ID NO: 85364 - DNA, 40 bp, Homo sapiens
ggtttttgaactagcaatgcctgtgaaaaagaaactgaat

SEQ ID NO: 85365 - DNA, 40 bp, Homo sapiens
attcagtttctttttcacaggcattgctagttcaaaaacc

SEQ ID NO: 85366 - DNA, 40 bp, Homo sapiens
gtttttgaactagcaatgcctgtgaaaaagaaactgaata

SEQ ID NO: 85367 - DNA, 40 bp, Homo sapiens
tattcagtttctttttcacaggcattgctagttcaaaaac

SEQ ID NO: 85368 - DNA, 40 bp, Homo sapiens
tttttgaactagcaatgcctgtgaaaaagaaactgaatac

SEQ ID NO: 85369 - DNA, 40 bp, Homo sapiens
gtattcagtttctttttcacaggcattgctagttcaaaaa

SEQ ID NO: 85370 - DNA, 40 bp, Homo sapiens
ttttgaactagcaatgcctgtgaaaaagaaactgaatacc

SEQ ID NO: 85371 - DNA, 40 bp, Homo sapiens
ggtattcagtttctttttcacaggcattgctagttcaaaa

SEQ ID NO: 85372 - DNA, 40 bp, Homo sapiens
tttgaactagcaatgcctgtgaaaaagaaactgaatacct

SEQ ID NO: 85373 - DNA, 40 bp, Homo sapiens
aggtattcagtttctttttcacaggcattgctagttcaaa

SEQ ID NO: 85374 - DNA, 40 bp, Homo sapiens
ttgaactagcaatgcctgtgaaaaagaaactgaataccta

SEQ ID NO: 85375 - DNA, 40 bp, Homo sapiens
taggtattcagtttctttttcacaggcattgctagttcaa

SEQ ID NO: 85376 - DNA, 40 bp, Homo sapiens
tgaactagcaatgcctgtgaaaaagaaactgaatacctaa

SEQ ID NO: 85377 - DNA, 40 bp, Homo sapiens
ttaggtattcagtttctttttcacaggcattgctagttca

SEQ ID NO: 85378 - DNA, 40 bp, Homo sapiens
gaactagcaatgcctgtgaaaaagaaactgaatacctaag

SEQ ID NO: 85379 - DNA, 40 bp, Homo sapiens
cttaggtattcagtttctttttcacaggcattgctagttc

SEQ ID NO: 85380 - DNA, 40 bp, Homo sapiens
aactagcaatgcctgtgaaaaagaaactgaatacctaaga

SEQ ID NO: 85381 - DNA, 40 bp, Homo sapiens
tcttaggtattcagtttctttttcacaggcattgctagtt

SEQ ID NO: 85382 - DNA, 40 bp, Homo sapiens
actagcaatgcctgtgaaaaagaaactgaatacctaagat

SEQ ID NO: 85383 - DNA, 40 bp, Homo sapiens
atcttaggtattcagtttctttttcacaggcattgctagt

SEQ ID NO: 85384 - DNA, 40 bp, Homo sapiens
ctagcaatgcctgtgaaaaagaaactgaatacctaagatt

SEQ ID NO: 85385 - DNA, 40 bp, Homo sapiens
aatcttaggtattcagtttctttttcacaggcattgctag

SEQ ID NO: 85386 - DNA, 40 bp, Homo sapiens
tagcaatgcctgtgaaaaagaaactgaatacctaagattt

SEQ ID NO: 85387 - DNA, 40 bp, Homo sapiens
aaatcttaggtattcagtttctttttcacaggcattgcta

SEQ ID NO: 85388 - DNA, 40 bp, Homo sapiens
agcaatgcctgtgaaaaagaaactgaatacctaagatttc

SEQ ID NO: 85389 - DNA, 40 bp, Homo sapiens
gaaatcttaggtattcagtttctttttcacaggcattgct

SEQ ID NO: 85390 - DNA, 40 bp, Homo sapiens
gcaatgcctgtgaaaaagaaactgaatacctaagatttct

SEQ ID NO: 85391 - DNA, 40 bp, Homo sapiens
agaaatcttaggtattcagtttctttttcacaggcattgc

SEQ ID NO: 85392 - DNA, 40 bp, Homo sapiens
caatgcctgtgaaaaagaaactgaatacctaagatttctg

SEQ ID NO: 85393 - DNA, 40 bp, Homo sapiens
cagaaatcttaggtattcagtttctttttcacaggcattg

SEQ ID NO: 85394 - DNA, 40 bp, Homo sapiens
aatgcctgtgaaaaagaaactgaatacctaagatttctgt

SEQ ID NO: 85395 - DNA, 40 bp, Homo sapiens
acagaaatcttaggtattcagtttctttttcacaggcatt

SEQ ID NO: 85396 - DNA, 40 bp, Homo sapiens
atgcctgtgaaaaagaaactgaatacctaagatttctgtc

SEQ ID NO: 85397 - DNA, 40 bp, Homo sapiens
gacagaaatcttaggtattcagtttctttttcacaggcat

SEQ ID NO: 85398 - DNA, 40 bp, Homo sapiens
tgcctgtgaaaaagaaactgaatacctaagatttctgtct

SEQ ID NO: 85399 - DNA, 40 bp, Homo sapiens
agacagaaatcttaggtattcagtttctttttcacaggca

SEQ ID NO: 85400 - DNA, 40 bp, Homo sapiens
gcctgtgaaaaagaaactgaatacctaagatttctgtctt

SEQ ID NO: 85401 - DNA, 40 bp, Homo sapiens
aagacagaaatcttaggtattcagtttctttttcacaggc

SEQ ID NO: 85402 - DNA, 40 bp, Homo sapiens
cctgtgaaaaagaaactgaatacctaagatttctgtcttg

SEQ ID NO: 85403 - DNA, 40 bp, Homo sapiens
caagacagaaatcttaggtattcagtttctttttcacagg

SEQ ID NO: 85404 - DNA, 40 bp, Homo sapiens
ctgtgaaaaagaaactgaatacctaagatttctgtcttgg

SEQ ID NO: 85405 - DNA, 40 bp, Homo sapiens
ccaagacagaaatcttaggtattcagtttctttttcacag

SEQ ID NO: 85406 - DNA, 40 bp, Homo sapiens
tgtgaaaaagaaactgaatacctaagatttctgtcttggg

SEQ ID NO: 85407 - DNA, 40 bp, Homo sapiens
cccaagacagaaatcttaggtattcagtttctttttcaca

SEQ ID NO: 85408 - DNA, 40 bp, Homo sapiens
gtgaaaaagaaactgaatacctaagatttctgtcttgggg

SEQ ID NO: 85409 - DNA, 40 bp, Homo sapiens
ccccaagacagaaatcttaggtattcagtttctttttcac

SEQ ID NO: 85410 - DNA, 40 bp, Homo sapiens
tgaaaaagaaactgaatacctaagatttctgtcttggggc

SEQ ID NO: 85411 - DNA, 40 bp, Homo sapiens
gccccaagacagaaatcttaggtattcagtttctttttca

SEQ ID NO: 85412 - DNA, 40 bp, Homo sapiens
gaaaaagaaactgaatacctaagatttctgtcttggggct

SEQ ID NO: 85413 - DNA, 40 bp, Homo sapiens
agccccaagacagaaatcttaggtattcagtttctttttc

SEQ ID NO: 85414 - DNA, 40 bp, Homo sapiens
aaaaagaaactgaatacctaagatttctgtcttggggctt

SEQ ID NO: 85415 - DNA, 40 bp, Homo sapiens
aagccccaagacagaaatcttaggtattcagtttcttttt

SEQ ID NO: 85416 - DNA, 40 bp, Homo sapiens
aaaagaaactgaatacctaagatttctgtcttggggcttt

SEQ ID NO: 85417 - DNA, 40 bp, Homo sapiens
aaagccccaagacagaaatcttaggtattcagtttctttt

SEQ ID NO: 85418 - DNA, 40 bp, Homo sapiens
aaagaaactgaatacctaagatttctgtcttggggctttt

SEQ ID NO: 85419 - DNA, 40 bp, Homo sapiens
aaaagccccaagacagaaatcttaggtattcagtttcttt

SEQ ID NO: 85420 - DNA, 40 bp, Homo sapiens
aagaaactgaatacctaagatttctgtcttggggcttttg

SEQ ID NO: 85421 - DNA, 40 bp, Homo sapiens
caaaagccccaagacagaaatcttaggtattcagtttctt

SEQ ID NO: 85422 - DNA, 40 bp, Homo sapiens
agaaactgaatacctaagatttctgtcttggggcttttgg

SEQ ID NO: 85423 - DNA, 40 bp, Homo sapiens
ccaaaagccccaagacagaaatcttaggtattcagtttct

SEQ ID NO: 85424 - DNA, 40 bp, Homo sapiens
gaaactgaatacctaagatttctgtcttggggcttttggt

SEQ ID NO: 85425 - DNA, 40 bp, Homo sapiens
accaaaagccccaagacagaaatcttaggtattcagtttc

SEQ ID NO: 85426 - DNA, 40 bp, Homo sapiens
aaactgaatacctaagatttctgtcttggggcttttggtg

SEQ ID NO: 85427 - DNA, 40 bp, Homo sapiens
caccaaaagccccaagacagaaatcttaggtattcagttt

SEQ ID NO: 85428 - DNA, 40 bp, Homo sapiens
aactgaatacctaagatttctgtcttggggcttttggtgc

SEQ ID NO: 85429 - DNA, 40 bp, Homo sapiens
gcaccaaaagccccaagacagaaatcttaggtattcagtt

SEQ ID NO: 85430 - DNA, 40 bp, Homo sapiens
actgaatacctaagatttctgtcttggggcttttggtgca

SEQ ID NO: 85431 - DNA, 40 bp, Homo sapiens
tgcaccaaaagccccaagacagaaatcttaggtattcagt

SEQ ID NO: 85432 - DNA, 40 bp, Homo sapiens
ctgaatacctaagatttctgtcttggggcttttggtgcat

SEQ ID NO: 85433 - DNA, 40 bp, Homo sapiens
atgcaccaaaagccccaagacagaaatcttaggtattcag

SEQ ID NO: 85434 - DNA, 40 bp, Homo sapiens
tgaatacctaagatttctgtcttggggcttttggtgcatg

SEQ ID NO: 85435 - DNA, 40 bp, Homo sapiens
catgcaccaaaagccccaagacagaaatcttaggtattca

SEQ ID NO: 85436 - DNA, 40 bp, Homo sapiens
gaatacctaagatttctgtcttggggcttttggtgcatgc

SEQ ID NO: 85437 - DNA, 40 bp, Homo sapiens
gcatgcaccaaaagccccaagacagaaatcttaggtattc

SEQ ID NO: 85438 - DNA, 40 bp, Homo sapiens
aatacctaagatttctgtcttggggcttttggtgcatgca

SEQ ID NO: 85439 - DNA, 40 bp, Homo sapiens
tgcatgcaccaaaagccccaagacagaaatcttaggtatt

SEQ ID NO: 85440 - DNA, 40 bp, Homo sapiens
atacctaagatttctgtcttggggcttttggtgcatgcag

SEQ ID NO: 85441 - DNA, 40 bp, Homo sapiens
ctgcatgcaccaaaagccccaagacagaaatcttaggtat

SEQ ID NO: 85442 - DNA, 40 bp, Homo sapiens
tacctaagatttctgtcttggggcttttggtgcatgcagt

SEQ ID NO: 85443 - DNA, 40 bp, Homo sapiens
actgcatgcaccaaaagccccaagacagaaatcttaggta

SEQ ID NO: 85444 - DNA, 40 bp, Homo sapiens
acctaagatttctgtcttggggcttttggtgcatgcagtt

SEQ ID NO: 85445 - DNA, 40 bp, Homo sapiens
aactgcatgcaccaaaagccccaagacagaaatcttaggt

SEQ ID NO: 85446 - DNA, 40 bp, Homo sapiens
cctaagatttctgtcttggggcttttggtgcatgcagttg

SEQ ID NO: 85447 - DNA, 40 bp, Homo sapiens
caactgcatgcaccaaaagccccaagacagaaatcttagg

SEQ ID NO: 85448 - DNA, 40 bp, Homo sapiens
ctaagatttctgtcttggggcttttggtgcatgcagttga

SEQ ID NO: 85449 - DNA, 40 bp, Homo sapiens
tcaactgcatgcaccaaaagccccaagacagaaatcttag

SEQ ID NO: 85450 - DNA, 40 bp, Homo sapiens
taagatttctgtcttggggcttttggtgcatgcagttgat

SEQ ID NO: 85451 - DNA, 40 bp, Homo sapiens
atcaactgcatgcaccaaaagccccaagacagaaatctta

SEQ ID NO: 85452 - DNA, 40 bp, Homo sapiens
aagatttctgtcttggggcttttggtgcatgcagttgatt

SEQ ID NO: 85453 - DNA, 40 bp, Homo sapiens
aatcaactgcatgcaccaaaagccccaagacagaaatctt

SEQ ID NO: 85454 - DNA, 40 bp, Homo sapiens
agatttctgtcttggggcttttggtgcatgcagttgatta

SEQ ID NO: 85455 - DNA, 40 bp, Homo sapiens
taatcaactgcatgcaccaaaagccccaagacagaaatct

SEQ ID NO: 85456 - DNA, 40 bp, Homo sapiens
gatttctgtcttggggcttttggtgcatgcagttgattac

SEQ ID NO: 85457 - DNA, 40 bp, Homo sapiens
gtaatcaactgcatgcaccaaaagccccaagacagaaatc

SEQ ID NO: 85458 - DNA, 40 bp, Homo sapiens
atttctgtcttggggcttttggtgcatgcagttgattact

SEQ ID NO: 85459 - DNA, 40 bp, Homo sapiens
agtaatcaactgcatgcaccaaaagccccaagacagaaat

SEQ ID NO: 85460 - DNA, 40 bp, Homo sapiens
tttctgtcttggggcttttggtgcatgcagttgattactt

SEQ ID NO: 85461 - DNA, 40 bp, Homo sapiens
aagtaatcaactgcatgcaccaaaagccccaagacagaaa

SEQ ID NO: 85462 - DNA, 40 bp, Homo sapiens
ttctgtcttggggcttttggtgcatgcagttgattacttc

SEQ ID NO: 85463 - DNA, 40 bp, Homo sapiens
gaagtaatcaactgcatgcaccaaaagccccaagacagaa

SEQ ID NO: 85464 - DNA, 40 bp, Homo sapiens
tctgtcttggggcttttggtgcatgcagttgattacttct

SEQ ID NO: 85465 - DNA, 40 bp, Homo sapiens
agaagtaatcaactgcatgcaccaaaagccccaagacaga

SEQ ID NO: 85466 - DNA, 40 bp, Homo sapiens
ctgtcttggggcttttggtgcatgcagttgattacttctt

SEQ ID NO: 85467 - DNA, 40 bp, Homo sapiens
aagaagtaatcaactgcatgcaccaaaagccccaagacag

SEQ ID NO: 85468 - DNA, 40 bp, Homo sapiens
tgtcttggggcttttggtgcatgcagttgattacttctta

SEQ ID NO: 85469 - DNA, 40 bp, Homo sapiens
taagaagtaatcaactgcatgcaccaaaagccccaagaca

SEQ ID NO: 85470 - DNA, 40 bp, Homo sapiens
gtcttggggcttttggtgcatgcagttgattacttcttat

SEQ ID NO: 85471 - DNA, 40 bp, Homo sapiens
ataagaagtaatcaactgcatgcaccaaaagccccaagac

SEQ ID NO: 85472 - DNA, 40 bp, Homo sapiens
tcttggggcttttggtgcatgcagttgattacttcttatt

SEQ ID NO: 85473 - DNA, 40 bp, Homo sapiens
aataagaagtaatcaactgcatgcaccaaaagccccaaga

SEQ ID NO: 85474 - DNA, 40 bp, Homo sapiens
cttggggcttttggtgcatgcagttgattacttcttattt

SEQ ID NO: 85475 - DNA, 40 bp, Homo sapiens
aaataagaagtaatcaactgcatgcaccaaaagccccaag

SEQ ID NO: 85476 - DNA, 40 bp, Homo sapiens
ttggggcttttggtgcatgcagttgattacttcttatttt

SEQ ID NO: 85477 - DNA, 40 bp, Homo sapiens
aaaataagaagtaatcaactgcatgcaccaaaagccccaa

SEQ ID NO: 85478 - DNA, 40 bp, Homo sapiens
tggggcttttggtgcatgcagttgattacttcttattttt

SEQ ID NO: 85479 - DNA, 40 bp, Homo sapiens
aaaaataagaagtaatcaactgcatgcaccaaaagcccca

SEQ ID NO: 85480 - DNA, 40 bp, Homo sapiens
ggggcttttggtgcatgcagttgattacttcttatttttc

SEQ ID NO: 85481 - DNA, 40 bp, Homo sapiens
gaaaaataagaagtaatcaactgcatgcaccaaaagcccc

SEQ ID NO: 85482 - DNA, 40 bp, Homo sapiens
gggcttttggtgcatgcagttgattacttcttatttttct

SEQ ID NO: 85483 - DNA, 40 bp, Homo sapiens
agaaaaataagaagtaatcaactgcatgcaccaaaagccc

SEQ ID NO: 85484 - DNA, 40 bp, Homo sapiens
ggcttttggtgcatgcagttgattacttcttatttttctt

SEQ ID NO: 85485 - DNA, 40 bp, Homo sapiens
aagaaaaataagaagtaatcaactgcatgcaccaaaagcc

SEQ ID NO: 85486 - DNA, 40 bp, Homo sapiens
gcttttggtgcatgcagttgattacttcttatttttctta

SEQ ID NO: 85487 - DNA, 40 bp, Homo sapiens
taagaaaaataagaagtaatcaactgcatgcaccaaaagc

SEQ ID NO: 85488 - DNA, 40 bp, Homo sapiens
cttttggtgcatgcagttgattacttcttatttttcttac

SEQ ID NO: 85489 - DNA, 40 bp, Homo sapiens
gtaagaaaaataagaagtaatcaactgcatgcaccaaaag

SEQ ID NO: 85490 - DNA, 40 bp, Homo sapiens
ttttggtgcatgcagttgattacttcttatttttcttacc

SEQ ID NO: 85491 - DNA, 40 bp, Homo sapiens
ggtaagaaaaataagaagtaatcaactgcatgcaccaaaa

SEQ ID NO: 85492 - DNA, 40 bp, Homo sapiens
tttggtgcatgcagttgattacttcttatttttcttacca

SEQ ID NO: 85493 - DNA, 40 bp, Homo sapiens
tggtaagaaaaataagaagtaatcaactgcatgcaccaaa

SEQ ID NO: 85494 - DNA, 40 bp, Homo sapiens
ttggtgcatgcagttgattacttcttatttttcttaccaa

SEQ ID NO: 85495 - DNA, 40 bp, Homo sapiens
ttggtaagaaaaataagaagtaatcaactgcatgcaccaa

SEQ ID NO: 85496 - DNA, 40 bp, Homo sapiens
tggtgcatgcagttgattacttcttatttttcttaccaat

SEQ ID NO: 85497 - DNA, 40 bp, Homo sapiens
attggtaagaaaaataagaagtaatcaactgcatgcacca

SEQ ID NO: 85498 - DNA, 40 bp, Homo sapiens
ggtgcatgcagttgattacttcttatttttcttaccaatt

SEQ ID NO: 85499 - DNA, 40 bp, Homo sapiens
aattggtaagaaaaataagaagtaatcaactgcatgcacc

SEQ ID NO: 85500 - DNA, 40 bp, Homo sapiens
gtgcatgcagttgattacttcttatttttcttaccaattg

SEQ ID NO: 85501 - DNA, 40 bp, Homo sapiens
caattggtaagaaaaataagaagtaatcaactgcatgcac

SEQ ID NO: 85502 - DNA, 40 bp, Homo sapiens
tgcatgcagttgattacttcttatttttcttaccaattgt

SEQ ID NO: 85503 - DNA, 40 bp, Homo sapiens
acaattggtaagaaaaataagaagtaatcaactgcatgca

SEQ ID NO: 85504 - DNA, 40 bp, Homo sapiens
gcatgcagttgattacttcttatttttcttaccaattgtg

SEQ ID NO: 85505 - DNA, 40 bp, Homo sapiens
cacaattggtaagaaaaataagaagtaatcaactgcatgc

SEQ ID NO: 85506 - DNA, 40 bp, Homo sapiens
catgcagttgattacttcttatttttcttaccaattgtga

SEQ ID NO: 85507 - DNA, 40 bp, Homo sapiens
tcacaattggtaagaaaaataagaagtaatcaactgcatg

SEQ ID NO: 85508 - DNA, 40 bp, Homo sapiens
atgcagttgattacttcttatttttcttaccaattgtgaa

SEQ ID NO: 85509 - DNA, 40 bp, Homo sapiens
ttcacaattggtaagaaaaataagaagtaatcaactgcat

SEQ ID NO: 85510 - DNA, 40 bp, Homo sapiens
tgcagttgattacttcttatttttcttaccaattgtgaat

SEQ ID NO: 85511 - DNA, 40 bp, Homo sapiens
attcacaattggtaagaaaaataagaagtaatcaactgca

SEQ ID NO: 85512 - DNA, 40 bp, Homo sapiens
gcagttgattacttcttatttttcttaccaattgtgaatg

SEQ ID NO: 85513 - DNA, 40 bp, Homo sapiens
cattcacaattggtaagaaaaataagaagtaatcaactgc

SEQ ID NO: 85514 - DNA, 40 bp, Homo sapiens
cagttgattacttcttatttttcttaccaattgtgaatgt

SEQ ID NO: 85515 - DNA, 40 bp, Homo sapiens
acattcacaattggtaagaaaaataagaagtaatcaactg

SEQ ID NO: 85516 - DNA, 40 bp, Homo sapiens
agttgattacttcttatttttcttaccaattgtgaatgtt

SEQ ID NO: 85517 - DNA, 40 bp, Homo sapiens
aacattcacaattggtaagaaaaataagaagtaatcaact

SEQ ID NO: 85518 - DNA, 40 bp, Homo sapiens
gttgattacttcttatttttcttaccaattgtgaatgttg

SEQ ID NO: 85519 - DNA, 40 bp, Homo sapiens
caacattcacaattggtaagaaaaataagaagtaatcaac

SEQ ID NO: 85520 - DNA, 40 bp, Homo sapiens
ttgattacttcttatttttcttaccaattgtgaatgttgg

SEQ ID NO: 85521 - DNA, 40 bp, Homo sapiens
ccaacattcacaattggtaagaaaaataagaagtaatcaa

SEQ ID NO: 85522 - DNA, 40 bp, Homo sapiens
tgattacttcttatttttcttaccaattgtgaatgttggt

SEQ ID NO: 85523 - DNA, 40 bp, Homo sapiens
accaacattcacaattggtaagaaaaataagaagtaatca

SEQ ID NO: 85524 - DNA, 40 bp, Homo sapiens
gattacttcttatttttcttaccaattgtgaatgttggtg

SEQ ID NO: 85525 - DNA, 40 bp, Homo sapiens
caccaacattcacaattggtaagaaaaataagaagtaatc

SEQ ID NO: 85526 - DNA, 40 bp, Homo sapiens
attacttcttatttttcttaccaattgtgaatgttggtgt

SEQ ID NO: 85527 - DNA, 40 bp, Homo sapiens
acaccaacattcacaattggtaagaaaaataagaagtaat

SEQ ID NO: 85528 - DNA, 40 bp, Homo sapiens
ttacttcttatttttcttaccaattgtgaatgttggtgtg

SEQ ID NO: 85529 - DNA, 40 bp, Homo sapiens
cacaccaacattcacaattggtaagaaaaataagaagtaa

SEQ ID NO: 85530 - DNA, 40 bp, Homo sapiens
tacttcttatttttcttaccaattgtgaatgttggtgtga

SEQ ID NO: 85531 - DNA, 40 bp, Homo sapiens
tcacaccaacattcacaattggtaagaaaaataagaagta

SEQ ID NO: 85532 - DNA, 40 bp, Homo sapiens
acttcttatttttcttaccaattgtgaatgttggtgtgaa

SEQ ID NO: 85533 - DNA, 40 bp, Homo sapiens
ttcacaccaacattcacaattggtaagaaaaataagaagt

SEQ ID NO: 85534 - DNA, 40 bp, Homo sapiens
cttcttatttttcttaccaattgtgaatgttggtgtgaaa

SEQ ID NO: 85535 - DNA, 40 bp, Homo sapiens
tttcacaccaacattcacaattggtaagaaaaataagaag

SEQ ID NO: 85536 - DNA, 40 bp, Homo sapiens
ttcttatttttcttaccaattgtgaatgttggtgtgaaac

SEQ ID NO: 85537 - DNA, 40 bp, Homo sapiens
gtttcacaccaacattcacaattggtaagaaaaataagaa

SEQ ID NO: 85538 - DNA, 40 bp, Homo sapiens
tcttatttttcttaccaattgtgaatgttggtgtgaaaca

SEQ ID NO: 85539 - DNA, 40 bp, Homo sapiens
tgtttcacaccaacattcacaattggtaagaaaaataaga

SEQ ID NO: 85540 - DNA, 40 bp, Homo sapiens
cttatttttcttaccaattgtgaatgttggtgtgaaacaa

SEQ ID NO: 85541 - DNA, 40 bp, Homo sapiens
ttgtttcacaccaacattcacaattggtaagaaaaataag

SEQ ID NO: 85542 - DNA, 40 bp, Homo sapiens
ttatttttcttaccaattgtgaatgttggtgtgaaacaaa

SEQ ID NO: 85543 - DNA, 40 bp, Homo sapiens
tttgtttcacaccaacattcacaattggtaagaaaaataa

SEQ ID NO: 85544 - DNA, 40 bp, Homo sapiens
tatttttcttaccaattgtgaatgttggtgtgaaacaaat

SEQ ID NO: 85545 - DNA, 40 bp, Homo sapiens
atttgtttcacaccaacattcacaattggtaagaaaaata

SEQ ID NO: 85546 - DNA, 40 bp, Homo sapiens
atttttcttaccaattgtgaatgttggtgtgaaacaaatt

SEQ ID NO: 85547 - DNA, 40 bp, Homo sapiens
aatttgtttcacaccaacattcacaattggtaagaaaaat

SEQ ID NO: 85548 - DNA, 40 bp, Homo sapiens
tttttcttaccaattgtgaatgttggtgtgaaacaaatta

SEQ ID NO: 85549 - DNA, 40 bp, Homo sapiens
taatttgtttcacaccaacattcacaattggtaagaaaaa

SEQ ID NO: 85550 - DNA, 40 bp, Homo sapiens
ttttcttaccaattgtgaatgttggtgtgaaacaaattaa

SEQ ID NO: 85551 - DNA, 40 bp, Homo sapiens
ttaatttgtttcacaccaacattcacaattggtaagaaaa

SEQ ID NO: 85552 - DNA, 40 bp, Homo sapiens
tttcttaccaattgtgaatgttggtgtgaaacaaattaat

SEQ ID NO: 85553 - DNA, 40 bp, Homo sapiens
attaatttgtttcacaccaacattcacaattggtaagaaa

SEQ ID NO: 85554 - DNA, 40 bp, Homo sapiens
ttcttaccaattgtgaatgttggtgtgaaacaaattaatg

SEQ ID NO: 85555 - DNA, 40 bp, Homo sapiens
cattaatttgtttcacaccaacattcacaattggtaagaa

SEQ ID NO: 85556 - DNA, 40 bp, Homo sapiens
tcttaccaattgtgaatgttggtgtgaaacaaattaatga

SEQ ID NO: 85557 - DNA, 40 bp, Homo sapiens
tcattaatttgtttcacaccaacattcacaattggtaaga

SEQ ID NO: 85558 - DNA, 40 bp, Homo sapiens
cttaccaattgtgaatgttggtgtgaaacaaattaatgaa

SEQ ID NO: 85559 - DNA, 40 bp, Homo sapiens
ttcattaatttgtttcacaccaacattcacaattggtaag

SEQ ID NO: 85560 - DNA, 40 bp, Homo sapiens
ttaccaattgtgaatgttggtgtgaaacaaattaatgaag

SEQ ID NO: 85561 - DNA, 40 bp, Homo sapiens
cttcattaatttgtttcacaccaacattcacaattggtaa

SEQ ID NO: 85562 - DNA, 40 bp, Homo sapiens
taccaattgtgaatgttggtgtgaaacaaattaatgaagc

SEQ ID NO: 85563 - DNA, 40 bp, Homo sapiens
gcttcattaatttgtttcacaccaacattcacaattggta

SEQ ID NO: 85564 - DNA, 40 bp, Homo sapiens
accaattgtgaatgttggtgtgaaacaaattaatgaagct

SEQ ID NO: 85565 - DNA, 40 bp, Homo sapiens
agcttcattaatttgtttcacaccaacattcacaattggt

SEQ ID NO: 85566 - DNA, 40 bp, Homo sapiens
ccaattgtgaatgttggtgtgaaacaaattaatgaagctt

SEQ ID NO: 85567 - DNA, 40 bp, Homo sapiens
aagcttcattaatttgtttcacaccaacattcacaattgg

SEQ ID NO: 85568 - DNA, 40 bp, Homo sapiens
caattgtgaatgttggtgtgaaacaaattaatgaagcttt

SEQ ID NO: 85569 - DNA, 40 bp, Homo sapiens
aaagcttcattaatttgtttcacaccaacattcacaattg

SEQ ID NO: 85570 - DNA, 40 bp, Homo sapiens
aattgtgaatgttggtgtgaaacaaattaatgaagctttt

SEQ ID NO: 85571 - DNA, 40 bp, Homo sapiens
aaaagcttcattaatttgtttcacaccaacattcacaatt

SEQ ID NO: 85572 - DNA, 40 bp, Homo sapiens
attgtgaatgttggtgtgaaacaaattaatgaagcttttg

SEQ ID NO: 85573 - DNA, 40 bp, Homo sapiens
caaaagcttcattaatttgtttcacaccaacattcacaat

SEQ ID NO: 85574 - DNA, 40 bp, Homo sapiens
ttgtgaatgttggtgtgaaacaaattaatgaagcttttga

SEQ ID NO: 85575 - DNA, 40 bp, Homo sapiens
tcaaaagcttcattaatttgtttcacaccaacattcacaa

SEQ ID NO: 85576 - DNA, 40 bp, Homo sapiens
tgtgaatgttggtgtgaaacaaattaatgaagcttttgaa

SEQ ID NO: 85577 - DNA, 40 bp, Homo sapiens
ttcaaaagcttcattaatttgtttcacaccaacattcaca

SEQ ID NO: 85578 - DNA, 40 bp, Homo sapiens
gtgaatgttggtgtgaaacaaattaatgaagcttttgaat

SEQ ID NO: 85579 - DNA, 40 bp, Homo sapiens
attcaaaagcttcattaatttgtttcacaccaacattcac

SEQ ID NO: 85580 - DNA, 40 bp, Homo sapiens
tgaatgttggtgtgaaacaaattaatgaagcttttgaatc

SEQ ID NO: 85581 - DNA, 40 bp, Homo sapiens
gattcaaaagcttcattaatttgtttcacaccaacattca

SEQ ID NO: 85582 - DNA, 40 bp, Homo sapiens
gaatgttggtgtgaaacaaattaatgaagcttttgaatca

SEQ ID NO: 85583 - DNA, 40 bp, Homo sapiens
tgattcaaaagcttcattaatttgtttcacaccaacattc

SEQ ID NO: 85584 - DNA, 40 bp, Homo sapiens
aatgttggtgtgaaacaaattaatgaagcttttgaatcat

SEQ ID NO: 85585 - DNA, 40 bp, Homo sapiens
atgattcaaaagcttcattaatttgtttcacaccaacatt

SEQ ID NO: 85586 - DNA, 40 bp, Homo sapiens
atgttggtgtgaaacaaattaatgaagcttttgaatcatc

SEQ ID NO: 85587 - DNA, 40 bp, Homo sapiens
gatgattcaaaagcttcattaatttgtttcacaccaacat

SEQ ID NO: 85588 - DNA, 40 bp, Homo sapiens
tgttggtgtgaaacaaattaatgaagcttttgaatcatcc

SEQ ID NO: 85589 - DNA, 40 bp, Homo sapiens
ggatgattcaaaagcttcattaatttgtttcacaccaaca

SEQ ID NO: 85590 - DNA, 40 bp, Homo sapiens
gttggtgtgaaacaaattaatgaagcttttgaatcatccc

SEQ ID NO: 85591 - DNA, 40 bp, Homo sapiens
gggatgattcaaaagcttcattaatttgtttcacaccaac

SEQ ID NO: 85592 - DNA, 40 bp, Homo sapiens
ttggtgtgaaacaaattaatgaagcttttgaatcatccct

SEQ ID NO: 85593 - DNA, 40 bp, Homo sapiens
agggatgattcaaaagcttcattaatttgtttcacaccaa

SEQ ID NO: 85594 - DNA, 40 bp, Homo sapiens
tggtgtgaaacaaattaatgaagcttttgaatcatcccta

SEQ ID NO: 85595 - DNA, 40 bp, Homo sapiens
tagggatgattcaaaagcttcattaatttgtttcacacca

SEQ ID NO: 85596 - DNA, 40 bp, Homo sapiens
ggtgtgaaacaaattaatgaagcttttgaatcatccctat

SEQ ID NO: 85597 - DNA, 40 bp, Homo sapiens
atagggatgattcaaaagcttcattaatttgtttcacacc

SEQ ID NO: 85598 - DNA, 40 bp, Homo sapiens
gtgtgaaacaaattaatgaagcttttgaatcatccctatt

SEQ ID NO: 85599 - DNA, 40 bp, Homo sapiens
aatagggatgattcaaaagcttcattaatttgtttcacac

SEQ ID NO: 85600 - DNA, 40 bp, Homo sapiens
tgtgaaacaaattaatgaagcttttgaatcatccctattc

SEQ ID NO: 85601 - DNA, 40 bp, Homo sapiens
gaatagggatgattcaaaagcttcattaatttgtttcaca

SEQ ID NO: 85602 - DNA, 40 bp, Homo sapiens
gtgaaacaaattaatgaagcttttgaatcatccctattct

SEQ ID NO: 85603 - DNA, 40 bp, Homo sapiens
agaatagggatgattcaaaagcttcattaatttgtttcac

SEQ ID NO: 85604 - DNA, 40 bp, Homo sapiens
tgaaacaaattaatgaagcttttgaatcatccctattctg

SEQ ID NO: 85605 - DNA, 40 bp, Homo sapiens
cagaatagggatgattcaaaagcttcattaatttgtttca

SEQ ID NO: 85606 - DNA, 40 bp, Homo sapiens
gaaacaaattaatgaagcttttgaatcatccctattctgt

SEQ ID NO: 85607 - DNA, 40 bp, Homo sapiens
acagaatagggatgattcaaaagcttcattaatttgtttc

SEQ ID NO: 85608 - DNA, 40 bp, Homo sapiens
aaacaaattaatgaagcttttgaatcatccctattctgtg

SEQ ID NO: 85609 - DNA, 40 bp, Homo sapiens
cacagaatagggatgattcaaaagcttcattaatttgttt

SEQ ID NO: 85610 - DNA, 40 bp, Homo sapiens
aacaaattaatgaagcttttgaatcatccctattctgtgt

SEQ ID NO: 85611 - DNA, 40 bp, Homo sapiens
acacagaatagggatgattcaaaagcttcattaatttgtt

SEQ ID NO: 85612 - DNA, 40 bp, Homo sapiens
acaaattaatgaagcttttgaatcatccctattctgtgtt

SEQ ID NO: 85613 - DNA, 40 bp, Homo sapiens
aacacagaatagggatgattcaaaagcttcattaatttgt

SEQ ID NO: 85614 - DNA, 40 bp, Homo sapiens
caaattaatgaagcttttgaatcatccctattctgtgttt

SEQ ID NO: 85615 - DNA, 40 bp, Homo sapiens
aaacacagaatagggatgattcaaaagcttcattaatttg

SEQ ID NO: 85616 - DNA, 40 bp, Homo sapiens
aaattaatgaagcttttgaatcatccctattctgtgtttt

SEQ ID NO: 85617 - DNA, 40 bp, Homo sapiens
aaaacacagaatagggatgattcaaaagcttcattaattt

SEQ ID NO: 85618 - DNA, 40 bp, Homo sapiens
aattaatgaagcttttgaatcatccctattctgtgtttta

SEQ ID NO: 85619 - DNA, 40 bp, Homo sapiens
taaaacacagaatagggatgattcaaaagcttcattaatt

SEQ ID NO: 85620 - DNA, 40 bp, Homo sapiens
attaatgaagcttttgaatcatccctattctgtgttttat

SEQ ID NO: 85621 - DNA, 40 bp, Homo sapiens
ataaaacacagaatagggatgattcaaaagcttcattaat

SEQ ID NO: 85622 - DNA, 40 bp, Homo sapiens
ttaatgaagcttttgaatcatccctattctgtgttttatc

SEQ ID NO: 85623 - DNA, 40 bp, Homo sapiens
gataaaacacagaatagggatgattcaaaagcttcattaa

SEQ ID NO: 85624 - DNA, 40 bp, Homo sapiens
taatgaagcttttgaatcatccctattctgtgttttatct

SEQ ID NO: 85625 - DNA, 40 bp, Homo sapiens
agataaaacacagaatagggatgattcaaaagcttcatta

SEQ ID NO: 85626 - DNA, 40 bp, Homo sapiens
aatgaagcttttgaatcatccctattctgtgttttatcta

SEQ ID NO: 85627 - DNA, 40 bp, Homo sapiens
tagataaaacacagaatagggatgattcaaaagcttcatt

SEQ ID NO: 85628 - DNA, 40 bp, Homo sapiens
atgaagcttttgaatcatccctattctgtgttttatctag

SEQ ID NO: 85629 - DNA, 40 bp, Homo sapiens
ctagataaaacacagaatagggatgattcaaaagcttcat

SEQ ID NO: 85630 - DNA, 40 bp, Homo sapiens
tgaagcttttgaatcatccctattctgtgttttatctagt

SEQ ID NO: 85631 - DNA, 40 bp, Homo sapiens
actagataaaacacagaatagggatgattcaaaagcttca

SEQ ID NO: 85632 - DNA, 40 bp, Homo sapiens
gaagcttttgaatcatccctattctgtgttttatctagtc

SEQ ID NO: 85633 - DNA, 40 bp, Homo sapiens
gactagataaaacacagaatagggatgattcaaaagcttc

SEQ ID NO: 85634 - DNA, 40 bp, Homo sapiens
aagcttttgaatcatccctattctgtgttttatctagtca

SEQ ID NO: 85635 - DNA, 40 bp, Homo sapiens
tgactagataaaacacagaatagggatgattcaaaagctt

SEQ ID NO: 85636 - DNA, 40 bp, Homo sapiens
agcttttgaatcatccctattctgtgttttatctagtcac

SEQ ID NO: 85637 - DNA, 40 bp, Homo sapiens
gtgactagataaaacacagaatagggatgattcaaaagct

SEQ ID NO: 85638 - DNA, 40 bp, Homo sapiens
gcttttgaatcatccctattctgtgttttatctagtcaca

SEQ ID NO: 85639 - DNA, 40 bp, Homo sapiens
tgtgactagataaaacacagaatagggatgattcaaaagc

SEQ ID NO: 85640 - DNA, 40 bp, Homo sapiens
cttttgaatcatccctattctgtgttttatctagtcacat

SEQ ID NO: 85641 - DNA, 40 bp, Homo sapiens
atgtgactagataaaacacagaatagggatgattcaaaag

SEQ ID NO: 85642 - DNA, 40 bp, Homo sapiens
ttttgaatcatccctattctgtgttttatctagtcacata

SEQ ID NO: 85643 - DNA, 40 bp, Homo sapiens
tatgtgactagataaaacacagaatagggatgattcaaaa

SEQ ID NO: 85644 - DNA, 40 bp, Homo sapiens
tttgaatcatccctattctgtgttttatctagtcacataa

SEQ ID NO: 85645 - DNA, 40 bp, Homo sapiens
ttatgtgactagataaaacacagaatagggatgattcaaa

SEQ ID NO: 85646 - DNA, 40 bp, Homo sapiens
ttgaatcatccctattctgtgttttatctagtcacataaa

SEQ ID NO: 85647 - DNA, 40 bp, Homo sapiens
tttatgtgactagataaaacacagaatagggatgattcaa

SEQ ID NO: 85648 - DNA, 40 bp, Homo sapiens
tgaatcatccctattctgtgttttatctagtcacataaat

SEQ ID NO: 85649 - DNA, 40 bp, Homo sapiens
atttatgtgactagataaaacacagaatagggatgattca

SEQ ID NO: 85650 - DNA, 40 bp, Homo sapiens
gaatcatccctattctgtgttttatctagtcacataaatg

SEQ ID NO: 85651 - DNA, 40 bp, Homo sapiens
catttatgtgactagataaaacacagaatagggatgattc

SEQ ID NO: 85652 - DNA, 40 bp, Homo sapiens
aatcatccctattctgtgttttatctagtcacataaatgg

SEQ ID NO: 85653 - DNA, 40 bp, Homo sapiens
ccatttatgtgactagataaaacacagaatagggatgatt

SEQ ID NO: 85654 - DNA, 40 bp, Homo sapiens
atcatccctattctgtgttttatctagtcacataaatgga

SEQ ID NO: 85655 - DNA, 40 bp, Homo sapiens
tccatttatgtgactagataaaacacagaatagggatgat

SEQ ID NO: 85656 - DNA, 40 bp, Homo sapiens
tcatccctattctgtgttttatctagtcacataaatggat

SEQ ID NO: 85657 - DNA, 40 bp, Homo sapiens
atccatttatgtgactagataaaacacagaatagggatga

SEQ ID NO: 85658 - DNA, 40 bp, Homo sapiens
catccctattctgtgttttatctagtcacataaatggatt

SEQ ID NO: 85659 - DNA, 40 bp, Homo sapiens
aatccatttatgtgactagataaaacacagaatagggatg

SEQ ID NO: 85660 - DNA, 40 bp, Homo sapiens
atccctattctgtgttttatctagtcacataaatggatta

SEQ ID NO: 85661 - DNA, 40 bp, Homo sapiens
taatccatttatgtgactagataaaacacagaatagggat

SEQ ID NO: 85662 - DNA, 40 bp, Homo sapiens
tccctattctgtgttttatctagtcacataaatggattaa

SEQ ID NO: 85663 - DNA, 40 bp, Homo sapiens
ttaatccatttatgtgactagataaaacacagaataggga

SEQ ID NO: 85664 - DNA, 40 bp, Homo sapiens
ccctattctgtgttttatctagtcacataaatggattaat

SEQ ID NO: 85665 - DNA, 40 bp, Homo sapiens
attaatccatttatgtgactagataaaacacagaataggg

SEQ ID NO: 85666 - DNA, 40 bp, Homo sapiens
cctattctgtgttttatctagtcacataaatggattaatt

SEQ ID NO: 85667 - DNA, 40 bp, Homo sapiens
aattaatccatttatgtgactagataaaacacagaatagg

SEQ ID NO: 85668 - DNA, 40 bp, Homo sapiens
ctattctgtgttttatctagtcacataaatggattaatta

SEQ ID NO: 85669 - DNA, 40 bp, Homo sapiens
taattaatccatttatgtgactagataaaacacagaatag

SEQ ID NO: 85670 - DNA, 40 bp, Homo sapiens
tattctgtgttttatctagtcacataaatggattaattac

SEQ ID NO: 85671 - DNA, 40 bp, Homo sapiens
gtaattaatccatttatgtgactagataaaacacagaata

SEQ ID NO: 85672 - DNA, 40 bp, Homo sapiens
attctgtgttttatctagtcacataaatggattaattact

SEQ ID NO: 85673 - DNA, 40 bp, Homo sapiens
agtaattaatccatttatgtgactagataaaacacagaat

SEQ ID NO: 85674 - DNA, 40 bp, Homo sapiens
ttctgtgttttatctagtcacataaatggattaattacta

SEQ ID NO: 85675 - DNA, 40 bp, Homo sapiens
tagtaattaatccatttatgtgactagataaaacacagaa

SEQ ID NO: 85676 - DNA, 40 bp, Homo sapiens
tctgtgttttatctagtcacataaatggattaattactaa

SEQ ID NO: 85677 - DNA, 40 bp, Homo sapiens
ttagtaattaatccatttatgtgactagataaaacacaga

SEQ ID NO: 85678 - DNA, 40 bp, Homo sapiens
ctgtgttttatctagtcacataaatggattaattactaat

SEQ ID NO: 85679 - DNA, 40 bp, Homo sapiens
attagtaattaatccatttatgtgactagataaaacacag

SEQ ID NO: 85680 - DNA, 40 bp, Homo sapiens
tgtgttttatctagtcacataaatggattaattactaatt

SEQ ID NO: 85681 - DNA, 40 bp, Homo sapiens
aattagtaattaatccatttatgtgactagataaaacaca

SEQ ID NO: 85682 - DNA, 40 bp, Homo sapiens
gtgttttatctagtcacataaatggattaattactaattt

SEQ ID NO: 85683 - DNA, 40 bp, Homo sapiens
aaattagtaattaatccatttatgtgactagataaaacac

SEQ ID NO: 85684 - DNA, 40 bp, Homo sapiens
tgttttatctagtcacataaatggattaattactaatttc

SEQ ID NO: 85685 - DNA, 40 bp, Homo sapiens
gaaattagtaattaatccatttatgtgactagataaaaca

SEQ ID NO: 85686 - DNA, 40 bp, Homo sapiens
gttttatctagtcacataaatggattaattactaatttca

SEQ ID NO: 85687 - DNA, 40 bp, Homo sapiens
tgaaattagtaattaatccatttatgtgactagataaaac

SEQ ID NO: 85688 - DNA, 40 bp, Homo sapiens
ttttatctagtcacataaatggattaattactaatttcag

SEQ ID NO: 85689 - DNA, 40 bp, Homo sapiens
ctgaaattagtaattaatccatttatgtgactagataaaa

SEQ ID NO: 85690 - DNA, 40 bp, Homo sapiens
tttatctagtcacataaatggattaattactaatttcagt

SEQ ID NO: 85691 - DNA, 40 bp, Homo sapiens
actgaaattagtaattaatccatttatgtgactagataaa

SEQ ID NO: 85692 - DNA, 40 bp, Homo sapiens
ttatctagtcacataaatggattaattactaatttcagtt

SEQ ID NO: 85693 - DNA, 40 bp, Homo sapiens
aactgaaattagtaattaatccatttatgtgactagataa

SEQ ID NO: 85694 - DNA, 40 bp, Homo sapiens
tatctagtcacataaatggattaattactaatttcagttg

SEQ ID NO: 85695 - DNA, 40 bp, Homo sapiens
caactgaaattagtaattaatccatttatgtgactagata

SEQ ID NO: 85696 - DNA, 40 bp, Homo sapiens
atctagtcacataaatggattaattactaatttcagttga

SEQ ID NO: 85697 - DNA, 40 bp, Homo sapiens
tcaactgaaattagtaattaatccatttatgtgactagat

SEQ ID NO: 85698 - DNA, 40 bp, Homo sapiens
tctagtcacataaatggattaattactaatttcagttgag

SEQ ID NO: 85699 - DNA, 40 bp, Homo sapiens
ctcaactgaaattagtaattaatccatttatgtgactaga

SEQ ID NO: 85700 - DNA, 40 bp, Homo sapiens
ctagtcacataaatggattaattactaatttcagttgaga

SEQ ID NO: 85701 - DNA, 40 bp, Homo sapiens
tctcaactgaaattagtaattaatccatttatgtgactag

SEQ ID NO: 85702 - DNA, 40 bp, Homo sapiens
tagtcacataaatggattaattactaatttcagttgagac

SEQ ID NO: 85703 - DNA, 40 bp, Homo sapiens
gtctcaactgaaattagtaattaatccatttatgtgacta

SEQ ID NO: 85704 - DNA, 40 bp, Homo sapiens
agtcacataaatggattaattactaatttcagttgagacc

SEQ ID NO: 85705 - DNA, 40 bp, Homo sapiens
ggtctcaactgaaattagtaattaatccatttatgtgact

SEQ ID NO: 85706 - DNA, 40 bp, Homo sapiens
gtcacataaatggattaattactaatttcagttgagacct

SEQ ID NO: 85707 - DNA, 40 bp, Homo sapiens
aggtctcaactgaaattagtaattaatccatttatgtgac

SEQ ID NO: 85708 - DNA, 40 bp, Homo sapiens
tcacataaatggattaattactaatttcagttgagacctt

SEQ ID NO: 85709 - DNA, 40 bp, Homo sapiens
aaggtctcaactgaaattagtaattaatccatttatgtga

SEQ ID NO: 85710 - DNA, 40 bp, Homo sapiens
cacataaatggattaattactaatttcagttgagaccttc

SEQ ID NO: 85711 - DNA, 40 bp, Homo sapiens
gaaggtctcaactgaaattagtaattaatccatttatgtg

SEQ ID NO: 85712 - DNA, 40 bp, Homo sapiens
acataaatggattaattactaatttcagttgagaccttct

SEQ ID NO: 85713 - DNA, 40 bp, Homo sapiens
agaaggtctcaactgaaattagtaattaatccatttatgt

SEQ ID NO: 85714 - DNA, 40 bp, Homo sapiens
cataaatggattaattactaatttcagttgagaccttcta

SEQ ID NO: 85715 - DNA, 40 bp, Homo sapiens
tagaaggtctcaactgaaattagtaattaatccatttatg

SEQ ID NO: 85716 - DNA, 40 bp, Homo sapiens
ataaatggattaattactaatttcagttgagaccttctaa

SEQ ID NO: 85717 - DNA, 40 bp, Homo sapiens
ttagaaggtctcaactgaaattagtaattaatccatttat

SEQ ID NO: 85718 - DNA, 40 bp, Homo sapiens
taaatggattaattactaatttcagttgagaccttctaat

SEQ ID NO: 85719 - DNA, 40 bp, Homo sapiens
attagaaggtctcaactgaaattagtaattaatccattta

SEQ ID NO: 85720 - DNA, 40 bp, Homo sapiens
aaatggattaattactaatttcagttgagaccttctaatt

SEQ ID NO: 85721 - DNA, 40 bp, Homo sapiens
aattagaaggtctcaactgaaattagtaattaatccattt

SEQ ID NO: 85722 - DNA, 40 bp, Homo sapiens
aatggattaattactaatttcagttgagaccttctaattg

SEQ ID NO: 85723 - DNA, 40 bp, Homo sapiens
caattagaaggtctcaactgaaattagtaattaatccatt

SEQ ID NO: 85724 - DNA, 40 bp, Homo sapiens
atggattaattactaatttcagttgagaccttctaattgg

SEQ ID NO: 85725 - DNA, 40 bp, Homo sapiens
ccaattagaaggtctcaactgaaattagtaattaatccat

SEQ ID NO: 85726 - DNA, 40 bp, Homo sapiens
tggattaattactaatttcagttgagaccttctaattggt

SEQ ID NO: 85727 - DNA, 40 bp, Homo sapiens
accaattagaaggtctcaactgaaattagtaattaatcca

SEQ ID NO: 85728 - DNA, 40 bp, Homo sapiens
ggattaattactaatttcagttgagaccttctaattggtt

SEQ ID NO: 85729 - DNA, 40 bp, Homo sapiens
aaccaattagaaggtctcaactgaaattagtaattaatcc

SEQ ID NO: 85730 - DNA, 40 bp, Homo sapiens
gattaattactaatttcagttgagaccttctaattggttt

SEQ ID NO: 85731 - DNA, 40 bp, Homo sapiens
aaaccaattagaaggtctcaactgaaattagtaattaatc

SEQ ID NO: 85732 - DNA, 40 bp, Homo sapiens
attaattactaatttcagttgagaccttctaattggtttt

SEQ ID NO: 85733 - DNA, 40 bp, Homo sapiens
aaaaccaattagaaggtctcaactgaaattagtaattaat

SEQ ID NO: 85734 - DNA, 40 bp, Homo sapiens
ttaattactaatttcagttgagaccttctaattggttttt

SEQ ID NO: 85735 - DNA, 40 bp, Homo sapiens
aaaaaccaattagaaggtctcaactgaaattagtaattaa

SEQ ID NO: 85736 - DNA, 40 bp, Homo sapiens
taattactaatttcagttgagaccttctaattggttttta

SEQ ID NO: 85737 - DNA, 40 bp, Homo sapiens
taaaaaccaattagaaggtctcaactgaaattagtaatta

SEQ ID NO: 85738 - DNA, 40 bp, Homo sapiens
aattactaatttcagttgagaccttctaattggtttttac

SEQ ID NO: 85739 - DNA, 40 bp, Homo sapiens
gtaaaaaccaattagaaggtctcaactgaaattagtaatt

SEQ ID NO: 85740 - DNA, 40 bp, Homo sapiens
attactaatttcagttgagaccttctaattggtttttact

SEQ ID NO: 85741 - DNA, 40 bp, Homo sapiens
agtaaaaaccaattagaaggtctcaactgaaattagtaat

SEQ ID NO: 85742 - DNA, 40 bp, Homo sapiens
ttactaatttcagttgagaccttctaattggtttttactg

SEQ ID NO: 85743 - DNA, 40 bp, Homo sapiens
cagtaaaaaccaattagaaggtctcaactgaaattagtaa

SEQ ID NO: 85744 - DNA, 40 bp, Homo sapiens
tactaatttcagttgagaccttctaattggtttttactga

SEQ ID NO: 85745 - DNA, 40 bp, Homo sapiens
tcagtaaaaaccaattagaaggtctcaactgaaattagta

SEQ ID NO: 85746 - DNA, 40 bp, Homo sapiens
actaatttcagttgagaccttctaattggtttttactgaa

SEQ ID NO: 85747 - DNA, 40 bp, Homo sapiens
ttcagtaaaaaccaattagaaggtctcaactgaaattagt

SEQ ID NO: 85748 - DNA, 40 bp, Homo sapiens
ctaatttcagttgagaccttctaattggtttttactgaaa

SEQ ID NO: 85749 - DNA, 40 bp, Homo sapiens
tttcagtaaaaaccaattagaaggtctcaactgaaattag

SEQ ID NO: 85750 - DNA, 40 bp, Homo sapiens
taatttcagttgagaccttctaattggtttttactgaaac

SEQ ID NO: 85751 - DNA, 40 bp, Homo sapiens
gtttcagtaaaaaccaattagaaggtctcaactgaaatta

SEQ ID NO: 85752 - DNA, 40 bp, Homo sapiens
aatttcagttgagaccttctaattggtttttactgaaaca

SEQ ID NO: 85753 - DNA, 40 bp, Homo sapiens
tgtttcagtaaaaaccaattagaaggtctcaactgaaatt

SEQ ID NO: 85754 - DNA, 40 bp, Homo sapiens
atttcagttgagaccttctaattggtttttactgaaacat

SEQ ID NO: 85755 - DNA, 40 bp, Homo sapiens
atgtttcagtaaaaaccaattagaaggtctcaactgaaat

SEQ ID NO: 85756 - DNA, 40 bp, Homo sapiens
tttcagttgagaccttctaattggtttttactgaaacatt

SEQ ID NO: 85757 - DNA, 40 bp, Homo sapiens
aatgtttcagtaaaaaccaattagaaggtctcaactgaaa

SEQ ID NO: 85758 - DNA, 40 bp, Homo sapiens
ttcagttgagaccttctaattggtttttactgaaacattg

SEQ ID NO: 85759 - DNA, 40 bp, Homo sapiens
caatgtttcagtaaaaaccaattagaaggtctcaactgaa

SEQ ID NO: 85760 - DNA, 40 bp, Homo sapiens
tcagttgagaccttctaattggtttttactgaaacattga

SEQ ID NO: 85761 - DNA, 40 bp, Homo sapiens
tcaatgtttcagtaaaaaccaattagaaggtctcaactga

SEQ ID NO: 85762 - DNA, 40 bp, Homo sapiens
cagttgagaccttctaattggtttttactgaaacattgag

SEQ ID NO: 85763 - DNA, 40 bp, Homo sapiens
ctcaatgtttcagtaaaaaccaattagaaggtctcaactg

SEQ ID NO: 85764 - DNA, 40 bp, Homo sapiens
agttgagaccttctaattggtttttactgaaacattgagg

SEQ ID NO: 85765 - DNA, 40 bp, Homo sapiens
cctcaatgtttcagtaaaaaccaattagaaggtctcaact

SEQ ID NO: 85766 - DNA, 40 bp, Homo sapiens
gttgagaccttctaattggtttttactgaaacattgaggg

SEQ ID NO: 85767 - DNA, 40 bp, Homo sapiens
ccctcaatgtttcagtaaaaaccaattagaaggtctcaac

SEQ ID NO: 85768 - DNA, 40 bp, Homo sapiens
ttgagaccttctaattggtttttactgaaacattgaggga

SEQ ID NO: 85769 - DNA, 40 bp, Homo sapiens
tccctcaatgtttcagtaaaaaccaattagaaggtctcaa

SEQ ID NO: 85770 - DNA, 40 bp, Homo sapiens
tgagaccttctaattggtttttactgaaacattgagggaa

SEQ ID NO: 85771 - DNA, 40 bp, Homo sapiens
ttccctcaatgtttcagtaaaaaccaattagaaggtctca

SEQ ID NO: 85772 - DNA, 40 bp, Homo sapiens
gagaccttctaattggtttttactgaaacattgagggaac

SEQ ID NO: 85773 - DNA, 40 bp, Homo sapiens
gttccctcaatgtttcagtaaaaaccaattagaaggtctc

SEQ ID NO: 85774 - DNA, 40 bp, Homo sapiens
agaccttctaattggtttttactgaaacattgagggaaca

SEQ ID NO: 85775 - DNA, 40 bp, Homo sapiens
tgttccctcaatgtttcagtaaaaaccaattagaaggtct

SEQ ID NO: 85776 - DNA, 40 bp, Homo sapiens
gaccttctaattggtttttactgaaacattgagggaacac

SEQ ID NO: 85777 - DNA, 40 bp, Homo sapiens
gtgttccctcaatgtttcagtaaaaaccaattagaaggtc

SEQ ID NO: 85778 - DNA, 40 bp, Homo sapiens
accttctaattggtttttactgaaacattgagggaacaca

SEQ ID NO: 85779 - DNA, 40 bp, Homo sapiens
tgtgttccctcaatgtttcagtaaaaaccaattagaaggt

SEQ ID NO: 85780 - DNA, 40 bp, Homo sapiens
ccttctaattggtttttactgaaacattgagggaacacaa

SEQ ID NO: 85781 - DNA, 40 bp, Homo sapiens
ttgtgttccctcaatgtttcagtaaaaaccaattagaagg

SEQ ID NO: 85782 - DNA, 40 bp, Homo sapiens
cttctaattggtttttactgaaacattgagggaacacaaa

SEQ ID NO: 85783 - DNA, 40 bp, Homo sapiens
tttgtgttccctcaatgtttcagtaaaaaccaattagaag

SEQ ID NO: 85784 - DNA, 40 bp, Homo sapiens
ttctaattggtttttactgaaacattgagggaacacaaat

SEQ ID NO: 85785 - DNA, 40 bp, Homo sapiens
atttgtgttccctcaatgtttcagtaaaaaccaattagaa

SEQ ID NO: 85786 - DNA, 40 bp, Homo sapiens
tctaattggtttttactgaaacattgagggaacacaaatt

SEQ ID NO: 85787 - DNA, 40 bp, Homo sapiens
aatttgtgttccctcaatgtttcagtaaaaaccaattaga

SEQ ID NO: 85788 - DNA, 40 bp, Homo sapiens
ctaattggtttttactgaaacattgagggaacacaaattt

SEQ ID NO: 85789 - DNA, 40 bp, Homo sapiens
aaatttgtgttccctcaatgtttcagtaaaaaccaattag

SEQ ID NO: 85790 - DNA, 40 bp, Homo sapiens
taattggtttttactgaaacattgagggaacacaaattta

SEQ ID NO: 85791 - DNA, 40 bp, Homo sapiens
taaatttgtgttccctcaatgtttcagtaaaaaccaatta

SEQ ID NO: 85792 - DNA, 40 bp, Homo sapiens
aattggtttttactgaaacattgagggaacacaaatttat

SEQ ID NO: 85793 - DNA, 40 bp, Homo sapiens
ataaatttgtgttccctcaatgtttcagtaaaaaccaatt

SEQ ID NO: 85794 - DNA, 40 bp, Homo sapiens
attggtttttactgaaacattgagggaacacaaatttatg

SEQ ID NO: 85795 - DNA, 40 bp, Homo sapiens
cataaatttgtgttccctcaatgtttcagtaaaaaccaat

SEQ ID NO: 85796 - DNA, 40 bp, Homo sapiens
ttggtttttactgaaacattgagggaacacaaatttatgg

SEQ ID NO: 85797 - DNA, 40 bp, Homo sapiens
ccataaatttgtgttccctcaatgtttcagtaaaaaccaa

SEQ ID NO: 85798 - DNA, 40 bp, Homo sapiens
tggtttttactgaaacattgagggaacacaaatttatggg

SEQ ID NO: 85799 - DNA, 40 bp, Homo sapiens
cccataaatttgtgttccctcaatgtttcagtaaaaacca

SEQ ID NO: 85800 - DNA, 40 bp, Homo sapiens
ggtttttactgaaacattgagggaacacaaatttatgggc

SEQ ID NO: 85801 - DNA, 40 bp, Homo sapiens
gcccataaatttgtgttccctcaatgtttcagtaaaaacc

SEQ ID NO: 85802 - DNA, 40 bp, Homo sapiens
gtttttactgaaacattgagggaacacaaatttatgggct

SEQ ID NO: 85803 - DNA, 40 bp, Homo sapiens
agcccataaatttgtgttccctcaatgtttcagtaaaaac

SEQ ID NO: 85804 - DNA, 40 bp, Homo sapiens
tttttactgaaacattgagggaacacaaatttatgggctt

SEQ ID NO: 85805 - DNA, 40 bp, Homo sapiens
aagcccataaatttgtgttccctcaatgtttcagtaaaaa

SEQ ID NO: 85806 - DNA, 40 bp, Homo sapiens
ttttactgaaacattgagggaacacaaatttatgggcttc

SEQ ID NO: 85807 - DNA, 40 bp, Homo sapiens
gaagcccataaatttgtgttccctcaatgtttcagtaaaa

SEQ ID NO: 85808 - DNA, 40 bp, Homo sapiens
tttactgaaacattgagggaacacaaatttatgggcttcc

SEQ ID NO: 85809 - DNA, 40 bp, Homo sapiens
ggaagcccataaatttgtgttccctcaatgtttcagtaaa

SEQ ID NO: 85810 - DNA, 40 bp, Homo sapiens
ttactgaaacattgagggaacacaaatttatgggcttcct

SEQ ID NO: 85811 - DNA, 40 bp, Homo sapiens
aggaagcccataaatttgtgttccctcaatgtttcagtaa

SEQ ID NO: 85812 - DNA, 40 bp, Homo sapiens
tactgaaacattgagggaacacaaatttatgggcttcctg

SEQ ID NO: 85813 - DNA, 40 bp, Homo sapiens
caggaagcccataaatttgtgttccctcaatgtttcagta

SEQ ID NO: 85814 - DNA, 40 bp, Homo sapiens
actgaaacattgagggaacacaaatttatgggcttcctga

SEQ ID NO: 85815 - DNA, 40 bp, Homo sapiens
tcaggaagcccataaatttgtgttccctcaatgtttcagt

SEQ ID NO: 85816 - DNA, 40 bp, Homo sapiens
ctgaaacattgagggaacacaaatttatgggcttcctgat

SEQ ID NO: 85817 - DNA, 40 bp, Homo sapiens
atcaggaagcccataaatttgtgttccctcaatgtttcag

SEQ ID NO: 85818 - DNA, 40 bp, Homo sapiens
tgaaacattgagggaacacaaatttatgggcttcctgatg

SEQ ID NO: 85819 - DNA, 40 bp, Homo sapiens
catcaggaagcccataaatttgtgttccctcaatgtttca

SEQ ID NO: 85820 - DNA, 40 bp, Homo sapiens
gaaacattgagggaacacaaatttatgggcttcctgatga

SEQ ID NO: 85821 - DNA, 40 bp, Homo sapiens
tcatcaggaagcccataaatttgtgttccctcaatgtttc

SEQ ID NO: 85822 - DNA, 40 bp, Homo sapiens
aaacattgagggaacacaaatttatgggcttcctgatgat

SEQ ID NO: 85823 - DNA, 40 bp, Homo sapiens
atcatcaggaagcccataaatttgtgttccctcaatgttt

SEQ ID NO: 85824 - DNA, 40 bp, Homo sapiens
aacattgagggaacacaaatttatgggcttcctgatgatg

SEQ ID NO: 85825 - DNA, 40 bp, Homo sapiens
catcatcaggaagcccataaatttgtgttccctcaatgtt

SEQ ID NO: 85826 - DNA, 40 bp, Homo sapiens
acattgagggaacacaaatttatgggcttcctgatgatga

SEQ ID NO: 85827 - DNA, 40 bp, Homo sapiens
tcatcatcaggaagcccataaatttgtgttccctcaatgt

SEQ ID NO: 85828 - DNA, 40 bp, Homo sapiens
cattgagggaacacaaatttatgggcttcctgatgatgat

SEQ ID NO: 85829 - DNA, 40 bp, Homo sapiens
atcatcatcaggaagcccataaatttgtgttccctcaatg

SEQ ID NO: 85830 - DNA, 40 bp, Homo sapiens
attgagggaacacaaatttatgggcttcctgatgatgatt

SEQ ID NO: 85831 - DNA, 40 bp, Homo sapiens
aatcatcatcaggaagcccataaatttgtgttccctcaat

SEQ ID NO: 85832 - DNA, 40 bp, Homo sapiens
ttgagggaacacaaatttatgggcttcctgatgatgattc

SEQ ID NO: 85833 - DNA, 40 bp, Homo sapiens
gaatcatcatcaggaagcccataaatttgtgttccctcaa

SEQ ID NO: 85834 - DNA, 40 bp, Homo sapiens
tgagggaacacaaatttatgggcttcctgatgatgattct

SEQ ID NO: 85835 - DNA, 40 bp, Homo sapiens
agaatcatcatcaggaagcccataaatttgtgttccctca

SEQ ID NO: 85836 - DNA, 40 bp, Homo sapiens
gagggaacacaaatttatgggcttcctgatgatgattctt

SEQ ID NO: 85837 - DNA, 40 bp, Homo sapiens
aagaatcatcatcaggaagcccataaatttgtgttccctc

SEQ ID NO: 85838 - DNA, 40 bp, Homo sapiens
agggaacacaaatttatgggcttcctgatgatgattcttc

SEQ ID NO: 85839 - DNA, 40 bp, Homo sapiens
gaagaatcatcatcaggaagcccataaatttgtgttccct

SEQ ID NO: 85840 - DNA, 40 bp, Homo sapiens
gggaacacaaatttatgggcttcctgatgatgattcttct

SEQ ID NO: 85841 - DNA, 40 bp, Homo sapiens
agaagaatcatcatcaggaagcccataaatttgtgttccc

SEQ ID NO: 85842 - DNA, 40 bp, Homo sapiens
ggaacacaaatttatgggcttcctgatgatgattcttcta

SEQ ID NO: 85843 - DNA, 40 bp, Homo sapiens
tagaagaatcatcatcaggaagcccataaatttgtgttcc

SEQ ID NO: 85844 - DNA, 40 bp, Homo sapiens
gaacacaaatttatgggcttcctgatgatgattcttctag

SEQ ID NO: 85845 - DNA, 40 bp, Homo sapiens
ctagaagaatcatcatcaggaagcccataaatttgtgttc

SEQ ID NO: 85846 - DNA, 40 bp, Homo sapiens
aacacaaatttatgggcttcctgatgatgattcttctagg

SEQ ID NO: 85847 - DNA, 40 bp, Homo sapiens
cctagaagaatcatcatcaggaagcccataaatttgtgtt

SEQ ID NO: 85848 - DNA, 40 bp, Homo sapiens
acacaaatttatgggcttcctgatgatgattcttctaggc

SEQ ID NO: 85849 - DNA, 40 bp, Homo sapiens
gcctagaagaatcatcatcaggaagcccataaatttgtgt

SEQ ID NO: 85850 - DNA, 40 bp, Homo sapiens
cacaaatttatgggcttcctgatgatgattcttctaggca

SEQ ID NO: 85851 - DNA, 40 bp, Homo sapiens
tgcctagaagaatcatcatcaggaagcccataaatttgtg

SEQ ID NO: 85852 - DNA, 40 bp, Homo sapiens
acaaatttatgggcttcctgatgatgattcttctaggcat

SEQ ID NO: 85853 - DNA, 40 bp, Homo sapiens
atgcctagaagaatcatcatcaggaagcccataaatttgt

SEQ ID NO: 85854 - DNA, 40 bp, Homo sapiens
caaatttatgggcttcctgatgatgattcttctaggcatc

SEQ ID NO: 85855 - DNA, 40 bp, Homo sapiens
gatgcctagaagaatcatcatcaggaagcccataaatttg

SEQ ID NO: 85856 - DNA, 40 bp, Homo sapiens
aaatttatgggcttcctgatgatgattcttctaggcatca

SEQ ID NO: 85857 - DNA, 40 bp, Homo sapiens
tgatgcctagaagaatcatcatcaggaagcccataaattt

SEQ ID NO: 85858 - DNA, 40 bp, Homo sapiens
aatttatgggcttcctgatgatgattcttctaggcatcat

SEQ ID NO: 85859 - DNA, 40 bp, Homo sapiens
atgatgcctagaagaatcatcatcaggaagcccataaatt

SEQ ID NO: 85860 - DNA, 40 bp, Homo sapiens
atttatgggcttcctgatgatgattcttctaggcatcatg

SEQ ID NO: 85861 - DNA, 40 bp, Homo sapiens
catgatgcctagaagaatcatcatcaggaagcccataaat

SEQ ID NO: 85862 - DNA, 40 bp, Homo sapiens
tttatgggcttcctgatgatgattcttctaggcatcatgt

SEQ ID NO: 85863 - DNA, 40 bp, Homo sapiens
acatgatgcctagaagaatcatcatcaggaagcccataaa

SEQ ID NO: 85864 - DNA, 40 bp, Homo sapiens
ttatgggcttcctgatgatgattcttctaggcatcatgtc

SEQ ID NO: 85865 - DNA, 40 bp, Homo sapiens
gacatgatgcctagaagaatcatcatcaggaagcccataa

SEQ ID NO: 85866 - DNA, 40 bp, Homo sapiens
tatgggcttcctgatgatgattcttctaggcatcatgtcc

SEQ ID NO: 85867 - DNA, 40 bp, Homo sapiens
ggacatgatgcctagaagaatcatcatcaggaagcccata

SEQ ID NO: 85868 - DNA, 40 bp, Homo sapiens
atgggcttcctgatgatgattcttctaggcatcatgtcct

SEQ ID NO: 85869 - DNA, 40 bp, Homo sapiens
aggacatgatgcctagaagaatcatcatcaggaagcccat

SEQ ID NO: 85870 - DNA, 40 bp, Homo sapiens
tgggcttcctgatgatgattcttctaggcatcatgtccta

SEQ ID NO: 85871 - DNA, 40 bp, Homo sapiens
taggacatgatgcctagaagaatcatcatcaggaagccca

SEQ ID NO: 85872 - DNA, 40 bp, Homo sapiens
gggcttcctgatgatgattcttctaggcatcatgtcctat

SEQ ID NO: 85873 - DNA, 40 bp, Homo sapiens
ataggacatgatgcctagaagaatcatcatcaggaagccc

SEQ ID NO: 85874 - DNA, 40 bp, Homo sapiens
ggcttcctgatgatgattcttctaggcatcatgtcctata

SEQ ID NO: 85875 - DNA, 40 bp, Homo sapiens
tataggacatgatgcctagaagaatcatcatcaggaagcc

SEQ ID NO: 85876 - DNA, 40 bp, Homo sapiens
gcttcctgatgatgattcttctaggcatcatgtcctatag

SEQ ID NO: 85877 - DNA, 40 bp, Homo sapiens
ctataggacatgatgcctagaagaatcatcatcaggaagc

SEQ ID NO: 85878 - DNA, 40 bp, Homo sapiens
cttcctgatgatgattcttctaggcatcatgtcctatagt

SEQ ID NO: 85879 - DNA, 40 bp, Homo sapiens
actataggacatgatgcctagaagaatcatcatcaggaag

SEQ ID NO: 85880 - DNA, 40 bp, Homo sapiens
ttcctgatgatgattcttctaggcatcatgtcctatagtt

SEQ ID NO: 85881 - DNA, 40 bp, Homo sapiens
aactataggacatgatgcctagaagaatcatcatcaggaa

SEQ ID NO: 85882 - DNA, 40 bp, Homo sapiens
tcctgatgatgattcttctaggcatcatgtcctatagttt

SEQ ID NO: 85883 - DNA, 40 bp, Homo sapiens
aaactataggacatgatgcctagaagaatcatcatcagga

SEQ ID NO: 85884 - DNA, 40 bp, Homo sapiens
cctgatgatgattcttctaggcatcatgtcctatagtttg

SEQ ID NO: 85885 - DNA, 40 bp, Homo sapiens
caaactataggacatgatgcctagaagaatcatcatcagg

SEQ ID NO: 85886 - DNA, 40 bp, Homo sapiens
ctgatgatgattcttctaggcatcatgtcctatagtttgt

SEQ ID NO: 85887 - DNA, 40 bp, Homo sapiens
acaaactataggacatgatgcctagaagaatcatcatcag

SEQ ID NO: 85888 - DNA, 40 bp, Homo sapiens
tgatgatgattcttctaggcatcatgtcctatagtttgtc

SEQ ID NO: 85889 - DNA, 40 bp, Homo sapiens
gacaaactataggacatgatgcctagaagaatcatcatca

SEQ ID NO: 85890 - DNA, 40 bp, Homo sapiens
gatgatgattcttctaggcatcatgtcctatagtttgtca

SEQ ID NO: 85891 - DNA, 40 bp, Homo sapiens
tgacaaactataggacatgatgcctagaagaatcatcatc

SEQ ID NO: 85892 - DNA, 40 bp, Homo sapiens
atgatgattcttctaggcatcatgtcctatagtttgtcat

SEQ ID NO: 85893 - DNA, 40 bp, Homo sapiens
atgacaaactataggacatgatgcctagaagaatcatcat

SEQ ID NO: 85894 - DNA, 40 bp, Homo sapiens
tgatgattcttctaggcatcatgtcctatagtttgtcatc

SEQ ID NO: 85895 - DNA, 40 bp, Homo sapiens
gatgacaaactataggacatgatgcctagaagaatcatca

SEQ ID NO: 85896 - DNA, 40 bp, Homo sapiens
gatgattcttctaggcatcatgtcctatagtttgtcatcc

SEQ ID NO: 85897 - DNA, 40 bp, Homo sapiens
ggatgacaaactataggacatgatgcctagaagaatcatc

SEQ ID NO: 85898 - DNA, 40 bp, Homo sapiens
atgattcttctaggcatcatgtcctatagtttgtcatccc

SEQ ID NO: 85899 - DNA, 40 bp, Homo sapiens
gggatgacaaactataggacatgatgcctagaagaatcat

SEQ ID NO: 85900 - DNA, 40 bp, Homo sapiens
tgattcttctaggcatcatgtcctatagtttgtcatccct

SEQ ID NO: 85901 - DNA, 40 bp, Homo sapiens
agggatgacaaactataggacatgatgcctagaagaatca

SEQ ID NO: 85902 - DNA, 40 bp, Homo sapiens
gattcttctaggcatcatgtcctatagtttgtcatccctg

SEQ ID NO: 85903 - DNA, 40 bp, Homo sapiens
cagggatgacaaactataggacatgatgcctagaagaatc

SEQ ID NO: 85904 - DNA, 40 bp, Homo sapiens
attcttctaggcatcatgtcctatagtttgtcatccctga

SEQ ID NO: 85905 - DNA, 40 bp, Homo sapiens
tcagggatgacaaactataggacatgatgcctagaagaat

SEQ ID NO: 85906 - DNA, 40 bp, Homo sapiens
ttcttctaggcatcatgtcctatagtttgtcatccctgat

SEQ ID NO: 85907 - DNA, 40 bp, Homo sapiens
atcagggatgacaaactataggacatgatgcctagaagaa

SEQ ID NO: 85908 - DNA, 40 bp, Homo sapiens
tcttctaggcatcatgtcctatagtttgtcatccctgatg

SEQ ID NO: 85909 - DNA, 40 bp, Homo sapiens
catcagggatgacaaactataggacatgatgcctagaaga

SEQ ID NO: 85910 - DNA, 40 bp, Homo sapiens
cttctaggcatcatgtcctatagtttgtcatccctgatga

SEQ ID NO: 85911 - DNA, 40 bp, Homo sapiens
tcatcagggatgacaaactataggacatgatgcctagaag

SEQ ID NO: 85912 - DNA, 40 bp, Homo sapiens
ttctaggcatcatgtcctatagtttgtcatccctgatgaa

SEQ ID NO: 85913 - DNA, 40 bp, Homo sapiens
ttcatcagggatgacaaactataggacatgatgcctagaa

SEQ ID NO: 85914 - DNA, 40 bp, Homo sapiens
tctaggcatcatgtcctatagtttgtcatccctgatgaat

SEQ ID NO: 85915 - DNA, 40 bp, Homo sapiens
attcatcagggatgacaaactataggacatgatgcctaga

SEQ ID NO: 85916 - DNA, 40 bp, Homo sapiens
ctaggcatcatgtcctatagtttgtcatccctgatgaatg

SEQ ID NO: 85917 - DNA, 40 bp, Homo sapiens
cattcatcagggatgacaaactataggacatgatgcctag

SEQ ID NO: 85918 - DNA, 40 bp, Homo sapiens
taggcatcatgtcctatagtttgtcatccctgatgaatgt

SEQ ID NO: 85919 - DNA, 40 bp, Homo sapiens
acattcatcagggatgacaaactataggacatgatgccta

SEQ ID NO: 85920 - DNA, 40 bp, Homo sapiens
aggcatcatgtcctatagtttgtcatccctgatgaatgta

SEQ ID NO: 85921 - DNA, 40 bp, Homo sapiens
tacattcatcagggatgacaaactataggacatgatgcct

SEQ ID NO: 85922 - DNA, 40 bp, Homo sapiens
ggcatcatgtcctatagtttgtcatccctgatgaatgtaa

SEQ ID NO: 85923 - DNA, 40 bp, Homo sapiens
ttacattcatcagggatgacaaactataggacatgatgcc

SEQ ID NO: 85924 - DNA, 40 bp, Homo sapiens
gcatcatgtcctatagtttgtcatccctgatgaatgtaaa

SEQ ID NO: 85925 - DNA, 40 bp, Homo sapiens
tttacattcatcagggatgacaaactataggacatgatgc

SEQ ID NO: 85926 - DNA, 40 bp, Homo sapiens
catcatgtcctatagtttgtcatccctgatgaatgtaaag

SEQ ID NO: 85927 - DNA, 40 bp, Homo sapiens
ctttacattcatcagggatgacaaactataggacatgatg

SEQ ID NO: 85928 - DNA, 40 bp, Homo sapiens
atcatgtcctatagtttgtcatccctgatgaatgtaaagt

SEQ ID NO: 85929 - DNA, 40 bp, Homo sapiens
actttacattcatcagggatgacaaactataggacatgat

SEQ ID NO: 85930 - DNA, 40 bp, Homo sapiens
tcatgtcctatagtttgtcatccctgatgaatgtaaagtt

SEQ ID NO: 85931 - DNA, 40 bp, Homo sapiens
aactttacattcatcagggatgacaaactataggacatga

SEQ ID NO: 85932 - DNA, 40 bp, Homo sapiens
catgtcctatagtttgtcatccctgatgaatgtaaagtta

SEQ ID NO: 85933 - DNA, 40 bp, Homo sapiens
taactttacattcatcagggatgacaaactataggacatg

SEQ ID NO: 85934 - DNA, 40 bp, Homo sapiens
atgtcctatagtttgtcatccctgatgaatgtaaagttac

SEQ ID NO: 85935 - DNA, 40 bp, Homo sapiens
gtaactttacattcatcagggatgacaaactataggacat

SEQ ID NO: 85936 - DNA, 40 bp, Homo sapiens
tgtcctatagtttgtcatccctgatgaatgtaaagttaca

SEQ ID NO: 85937 - DNA, 40 bp, Homo sapiens
tgtaactttacattcatcagggatgacaaactataggaca

SEQ ID NO: 85938 - DNA, 40 bp, Homo sapiens
gtcctatagtttgtcatccctgatgaatgtaaagttacac

SEQ ID NO: 85939 - DNA, 40 bp, Homo sapiens
gtgtaactttacattcatcagggatgacaaactataggac

SEQ ID NO: 85940 - DNA, 40 bp, Homo sapiens
tcctatagtttgtcatccctgatgaatgtaaagttacact

SEQ ID NO: 85941 - DNA, 40 bp, Homo sapiens
agtgtaactttacattcatcagggatgacaaactatagga

SEQ ID NO: 85942 - DNA, 40 bp, Homo sapiens
cctatagtttgtcatccctgatgaatgtaaagttacactg

SEQ ID NO: 85943 - DNA, 40 bp, Homo sapiens
cagtgtaactttacattcatcagggatgacaaactatagg

SEQ ID NO: 85944 - DNA, 40 bp, Homo sapiens
ctatagtttgtcatccctgatgaatgtaaagttacactgt

SEQ ID NO: 85945 - DNA, 40 bp, Homo sapiens
acagtgtaactttacattcatcagggatgacaaactatag

SEQ ID NO: 85946 - DNA, 40 bp, Homo sapiens
tatagtttgtcatccctgatgaatgtaaagttacactgtt

SEQ ID NO: 85947 - DNA, 40 bp, Homo sapiens
aacagtgtaactttacattcatcagggatgacaaactata

SEQ ID NO: 85948 - DNA, 40 bp, Homo sapiens
atagtttgtcatccctgatgaatgtaaagttacactgttc

SEQ ID NO: 85949 - DNA, 40 bp, Homo sapiens
gaacagtgtaactttacattcatcagggatgacaaactat

SEQ ID NO: 85950 - DNA, 40 bp, Homo sapiens
tagtttgtcatccctgatgaatgtaaagttacactgttca

SEQ ID NO: 85951 - DNA, 40 bp, Homo sapiens
tgaacagtgtaactttacattcatcagggatgacaaacta

SEQ ID NO: 85952 - DNA, 40 bp, Homo sapiens
agtttgtcatccctgatgaatgtaaagttacactgttcac

SEQ ID NO: 85953 - DNA, 40 bp, Homo sapiens
gtgaacagtgtaactttacattcatcagggatgacaaact

SEQ ID NO: 85954 - DNA, 40 bp, Homo sapiens
gtttgtcatccctgatgaatgtaaagttacactgttcaca

SEQ ID NO: 85955 - DNA, 40 bp, Homo sapiens
tgtgaacagtgtaactttacattcatcagggatgacaaac

SEQ ID NO: 85956 - DNA, 40 bp, Homo sapiens
tttgtcatccctgatgaatgtaaagttacactgttcacaa

SEQ ID NO: 85957 - DNA, 40 bp, Homo sapiens
ttgtgaacagtgtaactttacattcatcagggatgacaaa

SEQ ID NO: 85958 - DNA, 40 bp, Homo sapiens
ttgtcatccctgatgaatgtaaagttacactgttcacaaa

SEQ ID NO: 85959 - DNA, 40 bp, Homo sapiens
tttgtgaacagtgtaactttacattcatcagggatgacaa

SEQ ID NO: 85960 - DNA, 40 bp, Homo sapiens
tgtcatccctgatgaatgtaaagttacactgttcacaaag

SEQ ID NO: 85961 - DNA, 40 bp, Homo sapiens
ctttgtgaacagtgtaactttacattcatcagggatgaca

SEQ ID NO: 85962 - DNA, 40 bp, Homo sapiens
gtcatccctgatgaatgtaaagttacactgttcacaaagg

SEQ ID NO: 85963 - DNA, 40 bp, Homo sapiens
cctttgtgaacagtgtaactttacattcatcagggatgac

SEQ ID NO: 85964 - DNA, 40 bp, Homo sapiens
tcatccctgatgaatgtaaagttacactgttcacaaaggt

SEQ ID NO: 85965 - DNA, 40 bp, Homo sapiens
acctttgtgaacagtgtaactttacattcatcagggatga

SEQ ID NO: 85966 - DNA, 40 bp, Homo sapiens
catccctgatgaatgtaaagttacactgttcacaaaggtt

SEQ ID NO: 85967 - DNA, 40 bp, Homo sapiens
aacctttgtgaacagtgtaactttacattcatcagggatg

SEQ ID NO: 85968 - DNA, 40 bp, Homo sapiens
atccctgatgaatgtaaagttacactgttcacaaaggttt

SEQ ID NO: 85969 - DNA, 40 bp, Homo sapiens
aaacctttgtgaacagtgtaactttacattcatcagggat

SEQ ID NO: 85970 - DNA, 40 bp, Homo sapiens
tccctgatgaatgtaaagttacactgttcacaaaggtttt

SEQ ID NO: 85971 - DNA, 40 bp, Homo sapiens
aaaacctttgtgaacagtgtaactttacattcatcaggga

SEQ ID NO: 85972 - DNA, 40 bp, Homo sapiens
ccctgatgaatgtaaagttacactgttcacaaaggttttg

SEQ ID NO: 85973 - DNA, 40 bp, Homo sapiens
caaaacctttgtgaacagtgtaactttacattcatcaggg

SEQ ID NO: 85974 - DNA, 40 bp, Homo sapiens
cctgatgaatgtaaagttacactgttcacaaaggttttgt

SEQ ID NO: 85975 - DNA, 40 bp, Homo sapiens
acaaaacctttgtgaacagtgtaactttacattcatcagg

SEQ ID NO: 85976 - DNA, 40 bp, Homo sapiens
ctgatgaatgtaaagttacactgttcacaaaggttttgtc

SEQ ID NO: 85977 - DNA, 40 bp, Homo sapiens
gacaaaacctttgtgaacagtgtaactttacattcatcag

SEQ ID NO: 85978 - DNA, 40 bp, Homo sapiens
tgatgaatgtaaagttacactgttcacaaaggttttgtct

SEQ ID NO: 85979 - DNA, 40 bp, Homo sapiens
agacaaaacctttgtgaacagtgtaactttacattcatca

SEQ ID NO: 85980 - DNA, 40 bp, Homo sapiens
gatgaatgtaaagttacactgttcacaaaggttttgtctc

SEQ ID NO: 85981 - DNA, 40 bp, Homo sapiens
gagacaaaacctttgtgaacagtgtaactttacattcatc

SEQ ID NO: 85982 - DNA, 40 bp, Homo sapiens
atgaatgtaaagttacactgttcacaaaggttttgtctcc

SEQ ID NO: 85983 - DNA, 40 bp, Homo sapiens
ggagacaaaacctttgtgaacagtgtaactttacattcat

SEQ ID NO: 85984 - DNA, 40 bp, Homo sapiens
tgaatgtaaagttacactgttcacaaaggttttgtctcct

SEQ ID NO: 85985 - DNA, 40 bp, Homo sapiens
aggagacaaaacctttgtgaacagtgtaactttacattca

SEQ ID NO: 85986 - DNA, 40 bp, Homo sapiens
gaatgtaaagttacactgttcacaaaggttttgtctcctt

SEQ ID NO: 85987 - DNA, 40 bp, Homo sapiens
aaggagacaaaacctttgtgaacagtgtaactttacattc

SEQ ID NO: 85988 - DNA, 40 bp, Homo sapiens
aatgtaaagttacactgttcacaaaggttttgtctccttt

SEQ ID NO: 85989 - DNA, 40 bp, Homo sapiens
aaaggagacaaaacctttgtgaacagtgtaactttacatt

SEQ ID NO: 85990 - DNA, 40 bp, Homo sapiens
atgtaaagttacactgttcacaaaggttttgtctcctttc

SEQ ID NO: 85991 - DNA, 40 bp, Homo sapiens
gaaaggagacaaaacctttgtgaacagtgtaactttacat

SEQ ID NO: 85992 - DNA, 40 bp, Homo sapiens
tgtaaagttacactgttcacaaaggttttgtctcctttcc

SEQ ID NO: 85993 - DNA, 40 bp, Homo sapiens
ggaaaggagacaaaacctttgtgaacagtgtaactttaca

SEQ ID NO: 85994 - DNA, 40 bp, Homo sapiens
gtaaagttacactgttcacaaaggttttgtctcctttcca

SEQ ID NO: 85995 - DNA, 40 bp, Homo sapiens
tggaaaggagacaaaacctttgtgaacagtgtaactttac

SEQ ID NO: 85996 - DNA, 40 bp, Homo sapiens
taaagttacactgttcacaaaggttttgtctcctttccac

SEQ ID NO: 85997 - DNA, 40 bp, Homo sapiens
gtggaaaggagacaaaacctttgtgaacagtgtaacttta

SEQ ID NO: 85998 - DNA, 40 bp, Homo sapiens
aaagttacactgttcacaaaggttttgtctcctttccact

SEQ ID NO: 85999 - DNA, 40 bp, Homo sapiens
agtggaaaggagacaaaacctttgtgaacagtgtaacttt

SEQ ID NO: 86000 - DNA, 40 bp, Homo sapiens
aagttacactgttcacaaaggttttgtctcctttccactg

SEQ ID NO: 86001 - DNA, 40 bp, Homo sapiens
cagtggaaaggagacaaaacctttgtgaacagtgtaactt

SEQ ID NO: 86002 - DNA, 40 bp, Homo sapiens
agttacactgttcacaaaggttttgtctcctttccactgc

SEQ ID NO: 86003 - DNA, 40 bp, Homo sapiens
gcagtggaaaggagacaaaacctttgtgaacagtgtaact

SEQ ID NO: 86004 - DNA, 40 bp, Homo sapiens
gttacactgttcacaaaggttttgtctcctttccactgct

SEQ ID NO: 86005 - DNA, 40 bp, Homo sapiens
agcagtggaaaggagacaaaacctttgtgaacagtgtaac

SEQ ID NO: 86006 - DNA, 40 bp, Homo sapiens
ttacactgttcacaaaggttttgtctcctttccactgcta

SEQ ID NO: 86007 - DNA, 40 bp, Homo sapiens
tagcagtggaaaggagacaaaacctttgtgaacagtgtaa

SEQ ID NO: 86008 - DNA, 40 bp, Homo sapiens
tacactgttcacaaaggttttgtctcctttccactgctat

SEQ ID NO: 86009 - DNA, 40 bp, Homo sapiens
atagcagtggaaaggagacaaaacctttgtgaacagtgta

SEQ ID NO: 86010 - DNA, 40 bp, Homo sapiens
acactgttcacaaaggttttgtctcctttccactgctatt

SEQ ID NO: 86011 - DNA, 40 bp, Homo sapiens
aatagcagtggaaaggagacaaaacctttgtgaacagtgt

SEQ ID NO: 86012 - DNA, 40 bp, Homo sapiens
cactgttcacaaaggttttgtctcctttccactgctatta

SEQ ID NO: 86013 - DNA, 40 bp, Homo sapiens
taatagcagtggaaaggagacaaaacctttgtgaacagtg

SEQ ID NO: 86014 - DNA, 40 bp, Homo sapiens
actgttcacaaaggttttgtctcctttccactgctattag

SEQ ID NO: 86015 - DNA, 40 bp, Homo sapiens
ctaatagcagtggaaaggagacaaaacctttgtgaacagt

SEQ ID NO: 86016 - DNA, 40 bp, Homo sapiens
ctgttcacaaaggttttgtctcctttccactgctattagt

SEQ ID NO: 86017 - DNA, 40 bp, Homo sapiens
actaatagcagtggaaaggagacaaaacctttgtgaacag

SEQ ID NO: 86018 - DNA, 40 bp, Homo sapiens
tgttcacaaaggttttgtctcctttccactgctattagtc

SEQ ID NO: 86019 - DNA, 40 bp, Homo sapiens
gactaatagcagtggaaaggagacaaaacctttgtgaaca

SEQ ID NO: 86020 - DNA, 40 bp, Homo sapiens
gttcacaaaggttttgtctcctttccactgctattagtca

SEQ ID NO: 86021 - DNA, 40 bp, Homo sapiens
tgactaatagcagtggaaaggagacaaaacctttgtgaac

SEQ ID NO: 86022 - DNA, 40 bp, Homo sapiens
ttcacaaaggttttgtctcctttccactgctattagtcat

SEQ ID NO: 86023 - DNA, 40 bp, Homo sapiens
atgactaatagcagtggaaaggagacaaaacctttgtgaa

SEQ ID NO: 86024 - DNA, 40 bp, Homo sapiens
tcacaaaggttttgtctcctttccactgctattagtcatg

SEQ ID NO: 86025 - DNA, 40 bp, Homo sapiens
catgactaatagcagtggaaaggagacaaaacctttgtga

SEQ ID NO: 86026 - DNA, 40 bp, Homo sapiens
cacaaaggttttgtctcctttccactgctattagtcatgg

SEQ ID NO: 86027 - DNA, 40 bp, Homo sapiens
ccatgactaatagcagtggaaaggagacaaaacctttgtg

SEQ ID NO: 86028 - DNA, 40 bp, Homo sapiens
acaaaggttttgtctcctttccactgctattagtcatggt

SEQ ID NO: 86029 - DNA, 40 bp, Homo sapiens
accatgactaatagcagtggaaaggagacaaaacctttgt

SEQ ID NO: 86030 - DNA, 40 bp, Homo sapiens
caaaggttttgtctcctttccactgctattagtcatggtc

SEQ ID NO: 86031 - DNA, 40 bp, Homo sapiens
gaccatgactaatagcagtggaaaggagacaaaacctttg

SEQ ID NO: 86032 - DNA, 40 bp, Homo sapiens
aaaggttttgtctcctttccactgctattagtcatggtca

SEQ ID NO: 86033 - DNA, 40 bp, Homo sapiens
tgaccatgactaatagcagtggaaaggagacaaaaccttt

SEQ ID NO: 86034 - DNA, 40 bp, Homo sapiens
aaggttttgtctcctttccactgctattagtcatggtcac

SEQ ID NO: 86035 - DNA, 40 bp, Homo sapiens
gtgaccatgactaatagcagtggaaaggagacaaaacctt

SEQ ID NO: 86036 - DNA, 40 bp, Homo sapiens
aggttttgtctcctttccactgctattagtcatggtcact

SEQ ID NO: 86037 - DNA, 40 bp, Homo sapiens
agtgaccatgactaatagcagtggaaaggagacaaaacct

SEQ ID NO: 86038 - DNA, 40 bp, Homo sapiens
ggttttgtctcctttccactgctattagtcatggtcactc

SEQ ID NO: 86039 - DNA, 40 bp, Homo sapiens
gagtgaccatgactaatagcagtggaaaggagacaaaacc

SEQ ID NO: 86040 - DNA, 40 bp, Homo sapiens
gttttgtctcctttccactgctattagtcatggtcactct

SEQ ID NO: 86041 - DNA, 40 bp, Homo sapiens
agagtgaccatgactaatagcagtggaaaggagacaaaac

SEQ ID NO: 86042 - DNA, 40 bp, Homo sapiens
ttttgtctcctttccactgctattagtcatggtcactctc

SEQ ID NO: 86043 - DNA, 40 bp, Homo sapiens
gagagtgaccatgactaatagcagtggaaaggagacaaaa

SEQ ID NO: 86044 - DNA, 40 bp, Homo sapiens
tttgtctcctttccactgctattagtcatggtcactctcc

SEQ ID NO: 86045 - DNA, 40 bp, Homo sapiens
ggagagtgaccatgactaatagcagtggaaaggagacaaa

SEQ ID NO: 86046 - DNA, 40 bp, Homo sapiens
ttgtctcctttccactgctattagtcatggtcactctccc

SEQ ID NO: 86047 - DNA, 40 bp, Homo sapiens
gggagagtgaccatgactaatagcagtggaaaggagacaa

SEQ ID NO: 86048 - DNA, 40 bp, Homo sapiens
tgtctcctttccactgctattagtcatggtcactctcccc

SEQ ID NO: 86049 - DNA, 40 bp, Homo sapiens
ggggagagtgaccatgactaatagcagtggaaaggagaca

SEQ ID NO: 86050 - DNA, 40 bp, Homo sapiens
gtctcctttccactgctattagtcatggtcactctcccca

SEQ ID NO: 86051 - DNA, 40 bp, Homo sapiens
tggggagagtgaccatgactaatagcagtggaaaggagac

SEQ ID NO: 86052 - DNA, 40 bp, Homo sapiens
tctcctttccactgctattagtcatggtcactctccccaa

SEQ ID NO: 86053 - DNA, 40 bp, Homo sapiens
ttggggagagtgaccatgactaatagcagtggaaaggaga

SEQ ID NO: 86054 - DNA, 40 bp, Homo sapiens
ctcctttccactgctattagtcatggtcactctccccaaa

SEQ ID NO: 86055 - DNA, 40 bp, Homo sapiens
tttggggagagtgaccatgactaatagcagtggaaaggag

SEQ ID NO: 86056 - DNA, 40 bp, Homo sapiens
tcctttccactgctattagtcatggtcactctccccaaaa

SEQ ID NO: 86057 - DNA, 40 bp, Homo sapiens
ttttggggagagtgaccatgactaatagcagtggaaagga

SEQ ID NO: 86058 - DNA, 40 bp, Homo sapiens
cctttccactgctattagtcatggtcactctccccaaaat

SEQ ID NO: 86059 - DNA, 40 bp, Homo sapiens
attttggggagagtgaccatgactaatagcagtggaaagg

SEQ ID NO: 86060 - DNA, 40 bp, Homo sapiens
ctttccactgctattagtcatggtcactctccccaaaata

SEQ ID NO: 86061 - DNA, 40 bp, Homo sapiens
tattttggggagagtgaccatgactaatagcagtggaaag

SEQ ID NO: 86062 - DNA, 40 bp, Homo sapiens
tttccactgctattagtcatggtcactctccccaaaatat

SEQ ID NO: 86063 - DNA, 40 bp, Homo sapiens
atattttggggagagtgaccatgactaatagcagtggaaa

SEQ ID NO: 86064 - DNA, 40 bp, Homo sapiens
ttccactgctattagtcatggtcactctccccaaaatatt

SEQ ID NO: 86065 - DNA, 40 bp, Homo sapiens
aatattttggggagagtgaccatgactaatagcagtggaa

SEQ ID NO: 86066 - DNA, 40 bp, Homo sapiens
tccactgctattagtcatggtcactctccccaaaatatta

SEQ ID NO: 86067 - DNA, 40 bp, Homo sapiens
taatattttggggagagtgaccatgactaatagcagtgga

SEQ ID NO: 86068 - DNA, 40 bp, Homo sapiens
ccactgctattagtcatggtcactctccccaaaatattat

SEQ ID NO: 86069 - DNA, 40 bp, Homo sapiens
ataatattttggggagagtgaccatgactaatagcagtgg

SEQ ID NO: 86070 - DNA, 40 bp, Homo sapiens
cactgctattagtcatggtcactctccccaaaatattata

SEQ ID NO: 86071 - DNA, 40 bp, Homo sapiens
tataatattttggggagagtgaccatgactaatagcagtg

SEQ ID NO: 86072 - DNA, 40 bp, Homo sapiens
actgctattagtcatggtcactctccccaaaatattatat

SEQ ID NO: 86073 - DNA, 40 bp, Homo sapiens
atataatattttggggagagtgaccatgactaatagcagt

SEQ ID NO: 86074 - DNA, 40 bp, Homo sapiens
ctgctattagtcatggtcactctccccaaaatattatatt

SEQ ID NO: 86075 - DNA, 40 bp, Homo sapiens
aatataatattttggggagagtgaccatgactaatagcag

SEQ ID NO: 86076 - DNA, 40 bp, Homo sapiens
tgctattagtcatggtcactctccccaaaatattatattt

SEQ ID NO: 86077 - DNA, 40 bp, Homo sapiens
aaatataatattttggggagagtgaccatgactaatagca

SEQ ID NO: 86078 - DNA, 40 bp, Homo sapiens
gctattagtcatggtcactctccccaaaatattatatttt

SEQ ID NO: 86079 - DNA, 40 bp, Homo sapiens
aaaatataatattttggggagagtgaccatgactaatagc

SEQ ID NO: 86080 - DNA, 40 bp, Homo sapiens
ctattagtcatggtcactctccccaaaatattatattttt

SEQ ID NO: 86081 - DNA, 40 bp, Homo sapiens
aaaaatataatattttggggagagtgaccatgactaatag

SEQ ID NO: 86082 - DNA, 40 bp, Homo sapiens
tattagtcatggtcactctccccaaaatattatatttttt

SEQ ID NO: 86083 - DNA, 40 bp, Homo sapiens
aaaaaatataatattttggggagagtgaccatgactaata

SEQ ID NO: 86084 - DNA, 40 bp, Homo sapiens
attagtcatggtcactctccccaaaatattatattttttc

SEQ ID NO: 86085 - DNA, 40 bp, Homo sapiens
gaaaaaatataatattttggggagagtgaccatgactaat

SEQ ID NO: 86086 - DNA, 40 bp, Homo sapiens
ttagtcatggtcactctccccaaaatattatattttttct

SEQ ID NO: 86087 - DNA, 40 bp, Homo sapiens
agaaaaaatataatattttggggagagtgaccatgactaa

SEQ ID NO: 86088 - DNA, 40 bp, Homo sapiens
tagtcatggtcactctccccaaaatattatattttttcta

SEQ ID NO: 86089 - DNA, 40 bp, Homo sapiens
tagaaaaaatataatattttggggagagtgaccatgacta

SEQ ID NO: 86090 - DNA, 40 bp, Homo sapiens
agtcatggtcactctccccaaaatattatattttttctat

SEQ ID NO: 86091 - DNA, 40 bp, Homo sapiens
atagaaaaaatataatattttggggagagtgaccatgact

SEQ ID NO: 86092 - DNA, 40 bp, Homo sapiens
gtcatggtcactctccccaaaatattatattttttctata

SEQ ID NO: 86093 - DNA, 40 bp, Homo sapiens
tatagaaaaaatataatattttggggagagtgaccatgac

SEQ ID NO: 86094 - DNA, 40 bp, Homo sapiens
tcatggtcactctccccaaaatattatattttttctataa

SEQ ID NO: 86095 - DNA, 40 bp, Homo sapiens
ttatagaaaaaatataatattttggggagagtgaccatga

SEQ ID NO: 86096 - DNA, 40 bp, Homo sapiens
catggtcactctccccaaaatattatattttttctataaa

SEQ ID NO: 86097 - DNA, 40 bp, Homo sapiens
tttatagaaaaaatataatattttggggagagtgaccatg

SEQ ID NO: 86098 - DNA, 40 bp, Homo sapiens
atggtcactctccccaaaatattatattttttctataaaa

SEQ ID NO: 86099 - DNA, 40 bp, Homo sapiens
ttttatagaaaaaatataatattttggggagagtgaccat

SEQ ID NO: 86100 - DNA, 40 bp, Homo sapiens
tggtcactctccccaaaatattatattttttctataaaaa

SEQ ID NO: 86101 - DNA, 40 bp, Homo sapiens
tttttatagaaaaaatataatattttggggagagtgacca

SEQ ID NO: 86102 - DNA, 40 bp, Homo sapiens
ggtcactctccccaaaatattatattttttctataaaaag

SEQ ID NO: 86103 - DNA, 40 bp, Homo sapiens
ctttttatagaaaaaatataatattttggggagagtgacc

SEQ ID NO: 86104 - DNA, 40 bp, Homo sapiens
gtcactctccccaaaatattatattttttctataaaaaga

SEQ ID NO: 86105 - DNA, 40 bp, Homo sapiens
tctttttatagaaaaaatataatattttggggagagtgac

SEQ ID NO: 86106 - DNA, 40 bp, Homo sapiens
tcactctccccaaaatattatattttttctataaaaagaa

SEQ ID NO: 86107 - DNA, 40 bp, Homo sapiens
ttctttttatagaaaaaatataatattttggggagagtga

SEQ ID NO: 86108 - DNA, 40 bp, Homo sapiens
cactctccccaaaatattatattttttctataaaaagaaa

SEQ ID NO: 86109 - DNA, 40 bp, Homo sapiens
tttctttttatagaaaaaatataatattttggggagagtg

SEQ ID NO: 86110 - DNA, 40 bp, Homo sapiens
actctccccaaaatattatattttttctataaaaagaaaa

SEQ ID NO: 86111 - DNA, 40 bp, Homo sapiens
ttttctttttatagaaaaaatataatattttggggagagt

SEQ ID NO: 86112 - DNA, 40 bp, Homo sapiens
ctctccccaaaatattatattttttctataaaaagaaaaa

SEQ ID NO: 86113 - DNA, 40 bp, Homo sapiens
tttttctttttatagaaaaaatataatattttggggagag

SEQ ID NO: 86114 - DNA, 40 bp, Homo sapiens
tctccccaaaatattatattttttctataaaaagaaaaaa

SEQ ID NO: 86115 - DNA, 40 bp, Homo sapiens
ttttttctttttatagaaaaaatataatattttggggaga

SEQ ID NO: 86116 - DNA, 40 bp, Homo sapiens
ctccccaaaatattatattttttctataaaaagaaaaaaa

SEQ ID NO: 86117 - DNA, 40 bp, Homo sapiens
tttttttctttttatagaaaaaatataatattttggggag

SEQ ID NO: 86118 - DNA, 40 bp, Homo sapiens
tccccaaaatattatattttttctataaaaagaaaaaaat

SEQ ID NO: 86119 - DNA, 40 bp, Homo sapiens
atttttttctttttatagaaaaaatataatattttgggga

SEQ ID NO: 86120 - DNA, 40 bp, Homo sapiens
ccccaaaatattatattttttctataaaaagaaaaaaatg

SEQ ID NO: 86121 - DNA, 40 bp, Homo sapiens
catttttttctttttatagaaaaaatataatattttgggg

SEQ ID NO: 86122 - DNA, 40 bp, Homo sapiens
cccaaaatattatattttttctataaaaagaaaaaaatgg

SEQ ID NO: 86123 - DNA, 40 bp, Homo sapiens
ccatttttttctttttatagaaaaaatataatattttggg

SEQ ID NO: 86124 - DNA, 40 bp, Homo sapiens
ccaaaatattatattttttctataaaaagaaaaaaatgga

SEQ ID NO: 86125 - DNA, 40 bp, Homo sapiens
tccatttttttctttttatagaaaaaatataatattttgg

SEQ ID NO: 86126 - DNA, 40 bp, Homo sapiens
caaaatattatattttttctataaaaagaaaaaaatggaa

SEQ ID NO: 86127 - DNA, 40 bp, Homo sapiens
ttccatttttttctttttatagaaaaaatataatattttg

SEQ ID NO: 86128 - DNA, 40 bp, Homo sapiens
aaaatattatattttttctataaaaagaaaaaaatggaaa

SEQ ID NO: 86129 - DNA, 40 bp, Homo sapiens
tttccatttttttctttttatagaaaaaatataatatttt

SEQ ID NO: 86130 - DNA, 40 bp, Homo sapiens
aaatattatattttttctataaaaagaaaaaaatggaaaa

SEQ ID NO: 86131 - DNA, 40 bp, Homo sapiens
ttttccatttttttctttttatagaaaaaatataatattt

SEQ ID NO: 86132 - DNA, 40 bp, Homo sapiens
aatattatattttttctataaaaagaaaaaaatggaaaaa

SEQ ID NO: 86133 - DNA, 40 bp, Homo sapiens
tttttccatttttttctttttatagaaaaaatataatatt

SEQ ID NO: 86134 - DNA, 40 bp, Homo sapiens
atattatattttttctataaaaagaaaaaaatggaaaaaa

SEQ ID NO: 86135 - DNA, 40 bp, Homo sapiens
ttttttccatttttttctttttatagaaaaaatataatat

SEQ ID NO: 86136 - DNA, 40 bp, Homo sapiens
tattatattttttctataaaaagaaaaaaatggaaaaaaa

SEQ ID NO: 86137 - DNA, 40 bp, Homo sapiens
tttttttccatttttttctttttatagaaaaaatataata

SEQ ID NO: 86138 - DNA, 40 bp, Homo sapiens
attatattttttctataaaaagaaaaaaatggaaaaaaat

SEQ ID NO: 86139 - DNA, 40 bp, Homo sapiens
atttttttccatttttttctttttatagaaaaaatataat

SEQ ID NO: 86140 - DNA, 40 bp, Homo sapiens
ttatattttttctataaaaagaaaaaaatggaaaaaaatt

SEQ ID NO: 86141 - DNA, 40 bp, Homo sapiens
aatttttttccatttttttctttttatagaaaaaatataa

SEQ ID NO: 86142 - DNA, 40 bp, Homo sapiens
tatattttttctataaaaagaaaaaaatggaaaaaaatta

SEQ ID NO: 86143 - DNA, 40 bp, Homo sapiens
taatttttttccatttttttctttttatagaaaaaatata

SEQ ID NO: 86144 - DNA, 40 bp, Homo sapiens
atattttttctataaaaagaaaaaaatggaaaaaaattac

SEQ ID NO: 86145 - DNA, 40 bp, Homo sapiens
gtaatttttttccatttttttctttttatagaaaaaatat

SEQ ID NO: 86146 - DNA, 40 bp, Homo sapiens
tattttttctataaaaagaaaaaaatggaaaaaaattaca

SEQ ID NO: 86147 - DNA, 40 bp, Homo sapiens
tgtaatttttttccatttttttctttttatagaaaaaata

SEQ ID NO: 86148 - DNA, 40 bp, Homo sapiens
attttttctataaaaagaaaaaaatggaaaaaaattacaa

SEQ ID NO: 86149 - DNA, 40 bp, Homo sapiens
ttgtaatttttttccatttttttctttttatagaaaaaat

SEQ ID NO: 86150 - DNA, 40 bp, Homo sapiens
ttttttctataaaaagaaaaaaatggaaaaaaattacaag

SEQ ID NO: 86151 - DNA, 40 bp, Homo sapiens
cttgtaatttttttccatttttttctttttatagaaaaaa

SEQ ID NO: 86152 - DNA, 40 bp, Homo sapiens
tttttctataaaaagaaaaaaatggaaaaaaattacaagg

SEQ ID NO: 86153 - DNA, 40 bp, Homo sapiens
ccttgtaatttttttccatttttttctttttatagaaaaa

SEQ ID NO: 86154 - DNA, 40 bp, Homo sapiens
ttttctataaaaagaaaaaaatggaaaaaaattacaaggc

SEQ ID NO: 86155 - DNA, 40 bp, Homo sapiens
gccttgtaatttttttccatttttttctttttatagaaaa

SEQ ID NO: 86156 - DNA, 40 bp, Homo sapiens
tttctataaaaagaaaaaaatggaaaaaaattacaaggca

SEQ ID NO: 86157 - DNA, 40 bp, Homo sapiens
tgccttgtaatttttttccatttttttctttttatagaaa

SEQ ID NO: 86158 - DNA, 40 bp, Homo sapiens
ttctataaaaagaaaaaaatggaaaaaaattacaaggcaa

SEQ ID NO: 86159 - DNA, 40 bp, Homo sapiens
ttgccttgtaatttttttccatttttttctttttatagaa

SEQ ID NO: 86160 - DNA, 40 bp, Homo sapiens
tctataaaaagaaaaaaatggaaaaaaattacaaggcaat

SEQ ID NO: 86161 - DNA, 40 bp, Homo sapiens
attgccttgtaatttttttccatttttttctttttataga

SEQ ID NO: 86162 - DNA, 40 bp, Homo sapiens
ctataaaaagaaaaaaatggaaaaaaattacaaggcaatg

SEQ ID NO: 86163 - DNA, 40 bp, Homo sapiens
cattgccttgtaatttttttccatttttttctttttatag

SEQ ID NO: 86164 - DNA, 40 bp, Homo sapiens
tataaaaagaaaaaaatggaaaaaaattacaaggcaatgg

SEQ ID NO: 86165 - DNA, 40 bp, Homo sapiens
ccattgccttgtaatttttttccatttttttctttttata

SEQ ID NO: 86166 - DNA, 40 bp, Homo sapiens
ataaaaagaaaaaaatggaaaaaaattacaaggcaatgga

SEQ ID NO: 86167 - DNA, 40 bp, Homo sapiens
tccattgccttgtaatttttttccatttttttctttttat

SEQ ID NO: 86168 - DNA, 40 bp, Homo sapiens
taaaaagaaaaaaatggaaaaaaattacaaggcaatggaa

SEQ ID NO: 86169 - DNA, 40 bp, Homo sapiens
ttccattgccttgtaatttttttccatttttttcttttta

SEQ ID NO: 86170 - DNA, 40 bp, Homo sapiens
aaaaagaaaaaaatggaaaaaaattacaaggcaatggaaa

SEQ ID NO: 86171 - DNA, 40 bp, Homo sapiens
tttccattgccttgtaatttttttccatttttttcttttt

SEQ ID NO: 86172 - DNA, 40 bp, Homo sapiens
aaaagaaaaaaatggaaaaaaattacaaggcaatggaaac

SEQ ID NO: 86173 - DNA, 40 bp, Homo sapiens
gtttccattgccttgtaatttttttccatttttttctttt

SEQ ID NO: 86174 - DNA, 40 bp, Homo sapiens
aaagaaaaaaatggaaaaaaattacaaggcaatggaaact

SEQ ID NO: 86175 - DNA, 40 bp, Homo sapiens
agtttccattgccttgtaatttttttccatttttttcttt

SEQ ID NO: 86176 - DNA, 40 bp, Homo sapiens
aagaaaaaaatggaaaaaaattacaaggcaatggaaacta

SEQ ID NO: 86177 - DNA, 40 bp, Homo sapiens
tagtttccattgccttgtaatttttttccatttttttctt

SEQ ID NO: 86178 - DNA, 40 bp, Homo sapiens
agaaaaaaatggaaaaaaattacaaggcaatggaaactat

SEQ ID NO: 86179 - DNA, 40 bp, Homo sapiens
atagtttccattgccttgtaatttttttccatttttttct

SEQ ID NO: 86180 - DNA, 40 bp, Homo sapiens
gaaaaaaatggaaaaaaattacaaggcaatggaaactatt

SEQ ID NO: 86181 - DNA, 40 bp, Homo sapiens
aatagtttccattgccttgtaatttttttccatttttttc

SEQ ID NO: 86182 - DNA, 40 bp, Homo sapiens
aaaaaaatggaaaaaaattacaaggcaatggaaactatta

SEQ ID NO: 86183 - DNA, 40 bp, Homo sapiens
taatagtttccattgccttgtaatttttttccattttttt

SEQ ID NO: 86184 - DNA, 40 bp, Homo sapiens
aaaaaatggaaaaaaattacaaggcaatggaaactattat

SEQ ID NO: 86185 - DNA, 40 bp, Homo sapiens
ataatagtttccattgccttgtaatttttttccatttttt

SEQ ID NO: 86186 - DNA, 40 bp, Homo sapiens
aaaaatggaaaaaaattacaaggcaatggaaactattata

SEQ ID NO: 86187 - DNA, 40 bp, Homo sapiens
tataatagtttccattgccttgtaatttttttccattttt

SEQ ID NO: 86188 - DNA, 40 bp, Homo sapiens
aaaatggaaaaaaattacaaggcaatggaaactattataa

SEQ ID NO: 86189 - DNA, 40 bp, Homo sapiens
ttataatagtttccattgccttgtaatttttttccatttt

SEQ ID NO: 86190 - DNA, 40 bp, Homo sapiens
aaatggaaaaaaattacaaggcaatggaaactattataag

SEQ ID NO: 86191 - DNA, 40 bp, Homo sapiens
cttataatagtttccattgccttgtaatttttttccattt

SEQ ID NO: 86192 - DNA, 40 bp, Homo sapiens
aatggaaaaaaattacaaggcaatggaaactattataagg

SEQ ID NO: 86193 - DNA, 40 bp, Homo sapiens
ccttataatagtttccattgccttgtaatttttttccatt

SEQ ID NO: 86194 - DNA, 40 bp, Homo sapiens
atggaaaaaaattacaaggcaatggaaactattataaggc

SEQ ID NO: 86195 - DNA, 40 bp, Homo sapiens
gccttataatagtttccattgccttgtaatttttttccat

SEQ ID NO: 86196 - DNA, 40 bp, Homo sapiens
tggaaaaaaattacaaggcaatggaaactattataaggcc

SEQ ID NO: 86197 - DNA, 40 bp, Homo sapiens
ggccttataatagtttccattgccttgtaatttttttcca

SEQ ID NO: 86198 - DNA, 40 bp, Homo sapiens
ggaaaaaaattacaaggcaatggaaactattataaggcca

SEQ ID NO: 86199 - DNA, 40 bp, Homo sapiens
tggccttataatagtttccattgccttgtaatttttttcc

SEQ ID NO: 86200 - DNA, 40 bp, Homo sapiens
gaaaaaaattacaaggcaatggaaactattataaggccat

SEQ ID NO: 86201 - DNA, 40 bp, Homo sapiens
atggccttataatagtttccattgccttgtaatttttttc

SEQ ID NO: 86202 - DNA, 40 bp, Homo sapiens
aaaaaaattacaaggcaatggaaactattataaggccatt

SEQ ID NO: 86203 - DNA, 40 bp, Homo sapiens
aatggccttataatagtttccattgccttgtaattttttt

SEQ ID NO: 86204 - DNA, 40 bp, Homo sapiens
aaaaaattacaaggcaatggaaactattataaggccattt

SEQ ID NO: 86205 - DNA, 40 bp, Homo sapiens
aaatggccttataatagtttccattgccttgtaatttttt

SEQ ID NO: 86206 - DNA, 40 bp, Homo sapiens
aaaaattacaaggcaatggaaactattataaggccatttc

SEQ ID NO: 86207 - DNA, 40 bp, Homo sapiens
gaaatggccttataatagtttccattgccttgtaattttt

SEQ ID NO: 86208 - DNA, 40 bp, Homo sapiens
aaaattacaaggcaatggaaactattataaggccatttcc

SEQ ID NO: 86209 - DNA, 40 bp, Homo sapiens
ggaaatggccttataatagtttccattgccttgtaatttt

SEQ ID NO: 86210 - DNA, 40 bp, Homo sapiens
aaattacaaggcaatggaaactattataaggccatttcct

SEQ ID NO: 86211 - DNA, 40 bp, Homo sapiens
aggaaatggccttataatagtttccattgccttgtaattt

SEQ ID NO: 86212 - DNA, 40 bp, Homo sapiens
aattacaaggcaatggaaactattataaggccatttcctt

SEQ ID NO: 86213 - DNA, 40 bp, Homo sapiens
aaggaaatggccttataatagtttccattgccttgtaatt

SEQ ID NO: 86214 - DNA, 40 bp, Homo sapiens
attacaaggcaatggaaactattataaggccatttccttt

SEQ ID NO: 86215 - DNA, 40 bp, Homo sapiens
aaaggaaatggccttataatagtttccattgccttgtaat

SEQ ID NO: 86216 - DNA, 40 bp, Homo sapiens
ttacaaggcaatggaaactattataaggccatttcctttt

SEQ ID NO: 86217 - DNA, 40 bp, Homo sapiens
aaaaggaaatggccttataatagtttccattgccttgtaa

SEQ ID NO: 86218 - DNA, 40 bp, Homo sapiens
tacaaggcaatggaaactattataaggccatttccttttc

SEQ ID NO: 86219 - DNA, 40 bp, Homo sapiens
gaaaaggaaatggccttataatagtttccattgccttgta

SEQ ID NO: 86220 - DNA, 40 bp, Homo sapiens
acaaggcaatggaaactattataaggccatttccttttca

SEQ ID NO: 86221 - DNA, 40 bp, Homo sapiens
tgaaaaggaaatggccttataatagtttccattgccttgt

SEQ ID NO: 86222 - DNA, 40 bp, Homo sapiens
caaggcaatggaaactattataaggccatttccttttcac

SEQ ID NO: 86223 - DNA, 40 bp, Homo sapiens
gtgaaaaggaaatggccttataatagtttccattgccttg

SEQ ID NO: 86224 - DNA, 40 bp, Homo sapiens
aaggcaatggaaactattataaggccatttccttttcaca

SEQ ID NO: 86225 - DNA, 40 bp, Homo sapiens
tgtgaaaaggaaatggccttataatagtttccattgcctt

SEQ ID NO: 86226 - DNA, 40 bp, Homo sapiens
aggcaatggaaactattataaggccatttccttttcacat

SEQ ID NO: 86227 - DNA, 40 bp, Homo sapiens
atgtgaaaaggaaatggccttataatagtttccattgcct

SEQ ID NO: 86228 - DNA, 40 bp, Homo sapiens
ggcaatggaaactattataaggccatttccttttcacatt

SEQ ID NO: 86229 - DNA, 40 bp, Homo sapiens
aatgtgaaaaggaaatggccttataatagtttccattgcc

SEQ ID NO: 86230 - DNA, 40 bp, Homo sapiens
gcaatggaaactattataaggccatttccttttcacatta

SEQ ID NO: 86231 - DNA, 40 bp, Homo sapiens
taatgtgaaaaggaaatggccttataatagtttccattgc

SEQ ID NO: 86232 - DNA, 40 bp, Homo sapiens
caatggaaactattataaggccatttccttttcacattag

SEQ ID NO: 86233 - DNA, 40 bp, Homo sapiens
ctaatgtgaaaaggaaatggccttataatagtttccattg

SEQ ID NO: 86234 - DNA, 40 bp, Homo sapiens
aatggaaactattataaggccatttccttttcacattaga

SEQ ID NO: 86235 - DNA, 40 bp, Homo sapiens
tctaatgtgaaaaggaaatggccttataatagtttccatt

SEQ ID NO: 86236 - DNA, 40 bp, Homo sapiens
atggaaactattataaggccatttccttttcacattagat

SEQ ID NO: 86237 - DNA, 40 bp, Homo sapiens
atctaatgtgaaaaggaaatggccttataatagtttccat

SEQ ID NO: 86238 - DNA, 40 bp, Homo sapiens
tggaaactattataaggccatttccttttcacattagata

SEQ ID NO: 86239 - DNA, 40 bp, Homo sapiens
tatctaatgtgaaaaggaaatggccttataatagtttcca

SEQ ID NO: 86240 - DNA, 40 bp, Homo sapiens
ggaaactattataaggccatttccttttcacattagataa

SEQ ID NO: 86241 - DNA, 40 bp, Homo sapiens
ttatctaatgtgaaaaggaaatggccttataatagtttcc

SEQ ID NO: 86242 - DNA, 40 bp, Homo sapiens
gaaactattataaggccatttccttttcacattagataaa

SEQ ID NO: 86243 - DNA, 40 bp, Homo sapiens
tttatctaatgtgaaaaggaaatggccttataatagtttc

SEQ ID NO: 86244 - DNA, 40 bp, Homo sapiens
aaactattataaggccatttccttttcacattagataaat

SEQ ID NO: 86245 - DNA, 40 bp, Homo sapiens
atttatctaatgtgaaaaggaaatggccttataatagttt

SEQ ID NO: 86246 - DNA, 40 bp, Homo sapiens
aactattataaggccatttccttttcacattagataaatt

SEQ ID NO: 86247 - DNA, 40 bp, Homo sapiens
aatttatctaatgtgaaaaggaaatggccttataatagtt

SEQ ID NO: 86248 - DNA, 40 bp, Homo sapiens
actattataaggccatttccttttcacattagataaatta

SEQ ID NO: 86249 - DNA, 40 bp, Homo sapiens
taatttatctaatgtgaaaaggaaatggccttataatagt

SEQ ID NO: 86250 - DNA, 40 bp, Homo sapiens
ctattataaggccatttccttttcacattagataaattac

SEQ ID NO: 86251 - DNA, 40 bp, Homo sapiens
gtaatttatctaatgtgaaaaggaaatggccttataatag

SEQ ID NO: 86252 - DNA, 40 bp, Homo sapiens
tattataaggccatttccttttcacattagataaattact

SEQ ID NO: 86253 - DNA, 40 bp, Homo sapiens
agtaatttatctaatgtgaaaaggaaatggccttataata

SEQ ID NO: 86254 - DNA, 40 bp, Homo sapiens
attataaggccatttccttttcacattagataaattacta

SEQ ID NO: 86255 - DNA, 40 bp, Homo sapiens
tagtaatttatctaatgtgaaaaggaaatggccttataat

SEQ ID NO: 86256 - DNA, 40 bp, Homo sapiens
ttataaggccatttccttttcacattagataaattactat

SEQ ID NO: 86257 - DNA, 40 bp, Homo sapiens
atagtaatttatctaatgtgaaaaggaaatggccttataa

SEQ ID NO: 86258 - DNA, 40 bp, Homo sapiens
tataaggccatttccttttcacattagataaattactata

SEQ ID NO: 86259 - DNA, 40 bp, Homo sapiens
tatagtaatttatctaatgtgaaaaggaaatggccttata

SEQ ID NO: 86260 - DNA, 40 bp, Homo sapiens
ataaggccatttccttttcacattagataaattactataa

SEQ ID NO: 86261 - DNA, 40 bp, Homo sapiens
ttatagtaatttatctaatgtgaaaaggaaatggccttat

SEQ ID NO: 86262 - DNA, 40 bp, Homo sapiens
taaggccatttccttttcacattagataaattactataaa

SEQ ID NO: 86263 - DNA, 40 bp, Homo sapiens
tttatagtaatttatctaatgtgaaaaggaaatggcctta

SEQ ID NO: 86264 - DNA, 40 bp, Homo sapiens
aaggccatttccttttcacattagataaattactataaag

SEQ ID NO: 86265 - DNA, 40 bp, Homo sapiens
ctttatagtaatttatctaatgtgaaaaggaaatggcctt

SEQ ID NO: 86266 - DNA, 40 bp, Homo sapiens
aggccatttccttttcacattagataaattactataaaga

SEQ ID NO: 86267 - DNA, 40 bp, Homo sapiens
tctttatagtaatttatctaatgtgaaaaggaaatggcct

SEQ ID NO: 86268 - DNA, 40 bp, Homo sapiens
ggccatttccttttcacattagataaattactataaagac

SEQ ID NO: 86269 - DNA, 40 bp, Homo sapiens
gtctttatagtaatttatctaatgtgaaaaggaaatggcc

SEQ ID NO: 86270 - DNA, 40 bp, Homo sapiens
gccatttccttttcacattagataaattactataaagact

SEQ ID NO: 86271 - DNA, 40 bp, Homo sapiens
agtctttatagtaatttatctaatgtgaaaaggaaatggc

SEQ ID NO: 86272 - DNA, 40 bp, Homo sapiens
ccatttccttttcacattagataaattactataaagactc

SEQ ID NO: 86273 - DNA, 40 bp, Homo sapiens
gagtctttatagtaatttatctaatgtgaaaaggaaatgg

SEQ ID NO: 86274 - DNA, 40 bp, Homo sapiens
catttccttttcacattagataaattactataaagactcc

SEQ ID NO: 86275 - DNA, 40 bp, Homo sapiens
ggagtctttatagtaatttatctaatgtgaaaaggaaatg

SEQ ID NO: 86276 - DNA, 40 bp, Homo sapiens
atttccttttcacattagataaattactataaagactcct

SEQ ID NO: 86277 - DNA, 40 bp, Homo sapiens
aggagtctttatagtaatttatctaatgtgaaaaggaaat

SEQ ID NO: 86278 - DNA, 40 bp, Homo sapiens
tttccttttcacattagataaattactataaagactccta

SEQ ID NO: 86279 - DNA, 40 bp, Homo sapiens
taggagtctttatagtaatttatctaatgtgaaaaggaaa

SEQ ID NO: 86280 - DNA, 40 bp, Homo sapiens
ttccttttcacattagataaattactataaagactcctaa

SEQ ID NO: 86281 - DNA, 40 bp, Homo sapiens
ttaggagtctttatagtaatttatctaatgtgaaaaggaa

SEQ ID NO: 86282 - DNA, 40 bp, Homo sapiens
tccttttcacattagataaattactataaagactcctaat

SEQ ID NO: 86283 - DNA, 40 bp, Homo sapiens
attaggagtctttatagtaatttatctaatgtgaaaagga

SEQ ID NO: 86284 - DNA, 40 bp, Homo sapiens
ccttttcacattagataaattactataaagactcctaata

SEQ ID NO: 86285 - DNA, 40 bp, Homo sapiens
tattaggagtctttatagtaatttatctaatgtgaaaagg

SEQ ID NO: 86286 - DNA, 40 bp, Homo sapiens
cttttcacattagataaattactataaagactcctaatag

SEQ ID NO: 86287 - DNA, 40 bp, Homo sapiens
ctattaggagtctttatagtaatttatctaatgtgaaaag

SEQ ID NO: 86288 - DNA, 40 bp, Homo sapiens
ttttcacattagataaattactataaagactcctaatagc

SEQ ID NO: 86289 - DNA, 40 bp, Homo sapiens
gctattaggagtctttatagtaatttatctaatgtgaaaa

SEQ ID NO: 86290 - DNA, 40 bp, Homo sapiens
tttcacattagataaattactataaagactcctaatagct

SEQ ID NO: 86291 - DNA, 40 bp, Homo sapiens
agctattaggagtctttatagtaatttatctaatgtgaaa

SEQ ID NO: 86292 - DNA, 40 bp, Homo sapiens
ttcacattagataaattactataaagactcctaatagctt

SEQ ID NO: 86293 - DNA, 40 bp, Homo sapiens
aagctattaggagtctttatagtaatttatctaatgtgaa

SEQ ID NO: 86294 - DNA, 40 bp, Homo sapiens
tcacattagataaattactataaagactcctaatagcttt

SEQ ID NO: 86295 - DNA, 40 bp, Homo sapiens
aaagctattaggagtctttatagtaatttatctaatgtga

SEQ ID NO: 86296 - DNA, 40 bp, Homo sapiens
cacattagataaattactataaagactcctaatagctttt

SEQ ID NO: 86297 - DNA, 40 bp, Homo sapiens
aaaagctattaggagtctttatagtaatttatctaatgtg

SEQ ID NO: 86298 - DNA, 40 bp, Homo sapiens
acattagataaattactataaagactcctaatagcttttc

SEQ ID NO: 86299 - DNA, 40 bp, Homo sapiens
gaaaagctattaggagtctttatagtaatttatctaatgt

SEQ ID NO: 86300 - DNA, 40 bp, Homo sapiens
cattagataaattactataaagactcctaatagcttttcc

SEQ ID NO: 86301 - DNA, 40 bp, Homo sapiens
ggaaaagctattaggagtctttatagtaatttatctaatg

SEQ ID NO: 86302 - DNA, 40 bp, Homo sapiens
attagataaattactataaagactcctaatagcttttcct

SEQ ID NO: 86303 - DNA, 40 bp, Homo sapiens
aggaaaagctattaggagtctttatagtaatttatctaat

SEQ ID NO: 86304 - DNA, 40 bp, Homo sapiens
ttagataaattactataaagactcctaatagcttttcctg

SEQ ID NO: 86305 - DNA, 40 bp, Homo sapiens
caggaaaagctattaggagtctttatagtaatttatctaa

SEQ ID NO: 86306 - DNA, 40 bp, Homo sapiens
tagataaattactataaagactcctaatagcttttcctgt

SEQ ID NO: 86307 - DNA, 40 bp, Homo sapiens
acaggaaaagctattaggagtctttatagtaatttatcta

SEQ ID NO: 86308 - DNA, 40 bp, Homo sapiens
agataaattactataaagactcctaatagcttttcctgtt

SEQ ID NO: 86309 - DNA, 40 bp, Homo sapiens
aacaggaaaagctattaggagtctttatagtaatttatct

SEQ ID NO: 86310 - DNA, 40 bp, Homo sapiens
gataaattactataaagactcctaatagcttttcctgtta

SEQ ID NO: 86311 - DNA, 40 bp, Homo sapiens
taacaggaaaagctattaggagtctttatagtaatttatc

SEQ ID NO: 86312 - DNA, 40 bp, Homo sapiens
ataaattactataaagactcctaatagcttttcctgttaa

SEQ ID NO: 86313 - DNA, 40 bp, Homo sapiens
ttaacaggaaaagctattaggagtctttatagtaatttat

SEQ ID NO: 86314 - DNA, 40 bp, Homo sapiens
taaattactataaagactcctaatagcttttcctgttaag

SEQ ID NO: 86315 - DNA, 40 bp, Homo sapiens
cttaacaggaaaagctattaggagtctttatagtaattta

SEQ ID NO: 86316 - DNA, 40 bp, Homo sapiens
aaattactataaagactcctaatagcttttcctgttaagg

SEQ ID NO: 86317 - DNA, 40 bp, Homo sapiens
ccttaacaggaaaagctattaggagtctttatagtaattt

SEQ ID NO: 86318 - DNA, 40 bp, Homo sapiens
aattactataaagactcctaatagcttttcctgttaaggc

SEQ ID NO: 86319 - DNA, 40 bp, Homo sapiens
gccttaacaggaaaagctattaggagtctttatagtaatt

SEQ ID NO: 86320 - DNA, 40 bp, Homo sapiens
attactataaagactcctaatagcttttcctgttaaggca

SEQ ID NO: 86321 - DNA, 40 bp, Homo sapiens
tgccttaacaggaaaagctattaggagtctttatagtaat

SEQ ID NO: 86322 - DNA, 40 bp, Homo sapiens
ttactataaagactcctaatagcttttcctgttaaggcag

SEQ ID NO: 86323 - DNA, 40 bp, Homo sapiens
ctgccttaacaggaaaagctattaggagtctttatagtaa

SEQ ID NO: 86324 - DNA, 40 bp, Homo sapiens
tactataaagactcctaatagcttttcctgttaaggcaga

SEQ ID NO: 86325 - DNA, 40 bp, Homo sapiens
tctgccttaacaggaaaagctattaggagtctttatagta

SEQ ID NO: 86326 - DNA, 40 bp, Homo sapiens
actataaagactcctaatagcttttcctgttaaggcagac

SEQ ID NO: 86327 - DNA, 40 bp, Homo sapiens
gtctgccttaacaggaaaagctattaggagtctttatagt

SEQ ID NO: 86328 - DNA, 40 bp, Homo sapiens
ctataaagactcctaatagcttttcctgttaaggcagacc

SEQ ID NO: 86329 - DNA, 40 bp, Homo sapiens
ggtctgccttaacaggaaaagctattaggagtctttatag

SEQ ID NO: 86330 - DNA, 40 bp, Homo sapiens
tataaagactcctaatagcttttcctgttaaggcagaccc

SEQ ID NO: 86331 - DNA, 40 bp, Homo sapiens
gggtctgccttaacaggaaaagctattaggagtctttata

SEQ ID NO: 86332 - DNA, 40 bp, Homo sapiens
ataaagactcctaatagcttttcctgttaaggcagaccca

SEQ ID NO: 86333 - DNA, 40 bp, Homo sapiens
tgggtctgccttaacaggaaaagctattaggagtctttat

SEQ ID NO: 86334 - DNA, 40 bp, Homo sapiens
taaagactcctaatagcttttcctgttaaggcagacccag

SEQ ID NO: 86335 - DNA, 40 bp, Homo sapiens
ctgggtctgccttaacaggaaaagctattaggagtcttta

SEQ ID NO: 86336 - DNA, 40 bp, Homo sapiens
aaagactcctaatagcttttcctgttaaggcagacccagt

SEQ ID NO: 86337 - DNA, 40 bp, Homo sapiens
actgggtctgccttaacaggaaaagctattaggagtcttt

SEQ ID NO: 86338 - DNA, 40 bp, Homo sapiens
aagactcctaatagcttttcctgttaaggcagacccagta

SEQ ID NO: 86339 - DNA, 40 bp, Homo sapiens
tactgggtctgccttaacaggaaaagctattaggagtctt

SEQ ID NO: 86340 - DNA, 40 bp, Homo sapiens
agactcctaatagcttttcctgttaaggcagacccagtat

SEQ ID NO: 86341 - DNA, 40 bp, Homo sapiens
atactgggtctgccttaacaggaaaagctattaggagtct

SEQ ID NO: 86342 - DNA, 40 bp, Homo sapiens
gactcctaatagcttttcctgttaaggcagacccagtatg

SEQ ID NO: 86343 - DNA, 40 bp, Homo sapiens
catactgggtctgccttaacaggaaaagctattaggagtc

SEQ ID NO: 86344 - DNA, 40 bp, Homo sapiens
actcctaatagcttttcctgttaaggcagacccagtatga

SEQ ID NO: 86345 - DNA, 40 bp, Homo sapiens
tcatactgggtctgccttaacaggaaaagctattaggagt

SEQ ID NO: 86346 - DNA, 40 bp, Homo sapiens
ctcctaatagcttttcctgttaaggcagacccagtatgaa

SEQ ID NO: 86347 - DNA, 40 bp, Homo sapiens
ttcatactgggtctgccttaacaggaaaagctattaggag

SEQ ID NO: 86348 - DNA, 40 bp, Homo sapiens
tcctaatagcttttcctgttaaggcagacccagtatgaaa

SEQ ID NO: 86349 - DNA, 40 bp, Homo sapiens
tttcatactgggtctgccttaacaggaaaagctattagga

SEQ ID NO: 86350 - DNA, 40 bp, Homo sapiens
cctaatagcttttcctgttaaggcagacccagtatgaaat

SEQ ID NO: 86351 - DNA, 40 bp, Homo sapiens
atttcatactgggtctgccttaacaggaaaagctattagg

SEQ ID NO: 86352 - DNA, 40 bp, Homo sapiens
ctaatagcttttcctgttaaggcagacccagtatgaaatg

SEQ ID NO: 86353 - DNA, 40 bp, Homo sapiens
catttcatactgggtctgccttaacaggaaaagctattag

SEQ ID NO: 86354 - DNA, 40 bp, Homo sapiens
taatagcttttcctgttaaggcagacccagtatgaaatgg

SEQ ID NO: 86355 - DNA, 40 bp, Homo sapiens
ccatttcatactgggtctgccttaacaggaaaagctatta

SEQ ID NO: 86356 - DNA, 40 bp, Homo sapiens
aatagcttttcctgttaaggcagacccagtatgaaatggg

SEQ ID NO: 86357 - DNA, 40 bp, Homo sapiens
cccatttcatactgggtctgccttaacaggaaaagctatt

SEQ ID NO: 86358 - DNA, 40 bp, Homo sapiens
atagcttttcctgttaaggcagacccagtatgaaatgggg

SEQ ID NO: 86359 - DNA, 40 bp, Homo sapiens
ccccatttcatactgggtctgccttaacaggaaaagctat

SEQ ID NO: 86360 - DNA, 40 bp, Homo sapiens
tagcttttcctgttaaggcagacccagtatgaaatgggga

SEQ ID NO: 86361 - DNA, 40 bp, Homo sapiens
tccccatttcatactgggtctgccttaacaggaaaagcta

SEQ ID NO: 86362 - DNA, 40 bp, Homo sapiens
agcttttcctgttaaggcagacccagtatgaaatggggat

SEQ ID NO: 86363 - DNA, 40 bp, Homo sapiens
atccccatttcatactgggtctgccttaacaggaaaagct

SEQ ID NO: 86364 - DNA, 40 bp, Homo sapiens
gcttttcctgttaaggcagacccagtatgaaatggggatt

SEQ ID NO: 86365 - DNA, 40 bp, Homo sapiens
aatccccatttcatactgggtctgccttaacaggaaaagc

SEQ ID NO: 86366 - DNA, 40 bp, Homo sapiens
cttttcctgttaaggcagacccagtatgaaatggggatta

SEQ ID NO: 86367 - DNA, 40 bp, Homo sapiens
taatccccatttcatactgggtctgccttaacaggaaaag

SEQ ID NO: 86368 - DNA, 40 bp, Homo sapiens
ttttcctgttaaggcagacccagtatgaaatggggattat

SEQ ID NO: 86369 - DNA, 40 bp, Homo sapiens
ataatccccatttcatactgggtctgccttaacaggaaaa

SEQ ID NO: 86370 - DNA, 40 bp, Homo sapiens
tttcctgttaaggcagacccagtatgaaatggggattatt

SEQ ID NO: 86371 - DNA, 40 bp, Homo sapiens
aataatccccatttcatactgggtctgccttaacaggaaa

SEQ ID NO: 86372 - DNA, 40 bp, Homo sapiens
ttcctgttaaggcagacccagtatgaaatggggattatta

SEQ ID NO: 86373 - DNA, 40 bp, Homo sapiens
taataatccccatttcatactgggtctgccttaacaggaa

SEQ ID NO: 86374 - DNA, 40 bp, Homo sapiens
tcctgttaaggcagacccagtatgaaatggggattattat

SEQ ID NO: 86375 - DNA, 40 bp, Homo sapiens
ataataatccccatttcatactgggtctgccttaacagga

SEQ ID NO: 86376 - DNA, 40 bp, Homo sapiens
cctgttaaggcagacccagtatgaaatggggattattata

SEQ ID NO: 86377 - DNA, 40 bp, Homo sapiens
tataataatccccatttcatactgggtctgccttaacagg

SEQ ID NO: 86378 - DNA, 40 bp, Homo sapiens
ctgttaaggcagacccagtatgaaatggggattattatag

SEQ ID NO: 86379 - DNA, 40 bp, Homo sapiens
ctataataatccccatttcatactgggtctgccttaacag

SEQ ID NO: 86380 - DNA, 40 bp, Homo sapiens
tgttaaggcagacccagtatgaaatggggattattatagc

SEQ ID NO: 86381 - DNA, 40 bp, Homo sapiens
gctataataatccccatttcatactgggtctgccttaaca

SEQ ID NO: 86382 - DNA, 40 bp, Homo sapiens
gttaaggcagacccagtatgaaatggggattattatagca

SEQ ID NO: 86383 - DNA, 40 bp, Homo sapiens
tgctataataatccccatttcatactgggtctgccttaac

SEQ ID NO: 86384 - DNA, 40 bp, Homo sapiens
ttaaggcagacccagtatgaaatggggattattatagcaa

SEQ ID NO: 86385 - DNA, 40 bp, Homo sapiens
ttgctataataatccccatttcatactgggtctgccttaa

SEQ ID NO: 86386 - DNA, 40 bp, Homo sapiens
taaggcagacccagtatgaaatggggattattatagcaac

SEQ ID NO: 86387 - DNA, 40 bp, Homo sapiens
gttgctataataatccccatttcatactgggtctgcctta

SEQ ID NO: 86388 - DNA, 40 bp, Homo sapiens
aaggcagacccagtatgaaatggggattattatagcaacc

SEQ ID NO: 86389 - DNA, 40 bp, Homo sapiens
ggttgctataataatccccatttcatactgggtctgcctt

SEQ ID NO: 86390 - DNA, 40 bp, Homo sapiens
aggcagacccagtatgaaatggggattattatagcaacca

SEQ ID NO: 86391 - DNA, 40 bp, Homo sapiens
tggttgctataataatccccatttcatactgggtctgcct

SEQ ID NO: 86392 - DNA, 40 bp, Homo sapiens
ggcagacccagtatgaaatggggattattatagcaaccat

SEQ ID NO: 86393 - DNA, 40 bp, Homo sapiens
atggttgctataataatccccatttcatactgggtctgcc

SEQ ID NO: 86394 - DNA, 40 bp, Homo sapiens
gcagacccagtatgaaatggggattattatagcaaccatt

SEQ ID NO: 86395 - DNA, 40 bp, Homo sapiens
aatggttgctataataatccccatttcatactgggtctgc

SEQ ID NO: 86396 - DNA, 40 bp, Homo sapiens
cagacccagtatgaaatggggattattatagcaaccattt

SEQ ID NO: 86397 - DNA, 40 bp, Homo sapiens
aaatggttgctataataatccccatttcatactgggtctg

SEQ ID NO: 86398 - DNA, 40 bp, Homo sapiens
agacccagtatgaaatggggattattatagcaaccatttt

SEQ ID NO: 86399 - DNA, 40 bp, Homo sapiens
aaaatggttgctataataatccccatttcatactgggtct

SEQ ID NO: 86400 - DNA, 40 bp, Homo sapiens
gacccagtatgaaatggggattattatagcaaccattttg

SEQ ID NO: 86401 - DNA, 40 bp, Homo sapiens
caaaatggttgctataataatccccatttcatactgggtc

SEQ ID NO: 86402 - DNA, 40 bp, Homo sapiens
acccagtatgaaatggggattattatagcaaccattttgg

SEQ ID NO: 86403 - DNA, 40 bp, Homo sapiens
ccaaaatggttgctataataatccccatttcatactgggt

SEQ ID NO: 86404 - DNA, 40 bp, Homo sapiens
cccagtatgaaatggggattattatagcaaccattttggg

SEQ ID NO: 86405 - DNA, 40 bp, Homo sapiens
cccaaaatggttgctataataatccccatttcatactggg

SEQ ID NO: 86406 - DNA, 40 bp, Homo sapiens
ccagtatgaaatggggattattatagcaaccattttgggg

SEQ ID NO: 86407 - DNA, 40 bp, Homo sapiens
ccccaaaatggttgctataataatccccatttcatactgg

SEQ ID NO: 86408 - DNA, 40 bp, Homo sapiens
cagtatgaaatggggattattatagcaaccattttggggc

SEQ ID NO: 86409 - DNA, 40 bp, Homo sapiens
gccccaaaatggttgctataataatccccatttcatactg

SEQ ID NO: 86410 - DNA, 40 bp, Homo sapiens
agtatgaaatggggattattatagcaaccattttggggct

SEQ ID NO: 86411 - DNA, 40 bp, Homo sapiens
agccccaaaatggttgctataataatccccatttcatact

SEQ ID NO: 86412 - DNA, 40 bp, Homo sapiens
gtatgaaatggggattattatagcaaccattttggggcta

SEQ ID NO: 86413 - DNA, 40 bp, Homo sapiens
tagccccaaaatggttgctataataatccccatttcatac

SEQ ID NO: 86414 - DNA, 40 bp, Homo sapiens
tatgaaatggggattattatagcaaccattttggggctat

SEQ ID NO: 86415 - DNA, 40 bp, Homo sapiens
atagccccaaaatggttgctataataatccccatttcata

SEQ ID NO: 86416 - DNA, 40 bp, Homo sapiens
atgaaatggggattattatagcaaccattttggggctata

SEQ ID NO: 86417 - DNA, 40 bp, Homo sapiens
tatagccccaaaatggttgctataataatccccatttcat

SEQ ID NO: 86418 - DNA, 40 bp, Homo sapiens
tgaaatggggattattatagcaaccattttggggctatat

SEQ ID NO: 86419 - DNA, 40 bp, Homo sapiens
atatagccccaaaatggttgctataataatccccatttca

SEQ ID NO: 86420 - DNA, 40 bp, Homo sapiens
gaaatggggattattatagcaaccattttggggctatatt

SEQ ID NO: 86421 - DNA, 40 bp, Homo sapiens
aatatagccccaaaatggttgctataataatccccatttc

SEQ ID NO: 86422 - DNA, 40 bp, Homo sapiens
aaatggggattattatagcaaccattttggggctatattt

SEQ ID NO: 86423 - DNA, 40 bp, Homo sapiens
aaatatagccccaaaatggttgctataataatccccattt

SEQ ID NO: 86424 - DNA, 40 bp, Homo sapiens
aatggggattattatagcaaccattttggggctatattta

SEQ ID NO: 86425 - DNA, 40 bp, Homo sapiens
taaatatagccccaaaatggttgctataataatccccatt

SEQ ID NO: 86426 - DNA, 40 bp, Homo sapiens
atggggattattatagcaaccattttggggctatatttac

SEQ ID NO: 86427 - DNA, 40 bp, Homo sapiens
gtaaatatagccccaaaatggttgctataataatccccat

SEQ ID NO: 86428 - DNA, 40 bp, Homo sapiens
tggggattattatagcaaccattttggggctatatttaca

SEQ ID NO: 86429 - DNA, 40 bp, Homo sapiens
tgtaaatatagccccaaaatggttgctataataatcccca

SEQ ID NO: 86430 - DNA, 40 bp, Homo sapiens
ggggattattatagcaaccattttggggctatatttacat

SEQ ID NO: 86431 - DNA, 40 bp, Homo sapiens
atgtaaatatagccccaaaatggttgctataataatcccc

SEQ ID NO: 86432 - DNA, 40 bp, Homo sapiens
gggattattatagcaaccattttggggctatatttacatg

SEQ ID NO: 86433 - DNA, 40 bp, Homo sapiens
catgtaaatatagccccaaaatggttgctataataatccc

SEQ ID NO: 86434 - DNA, 40 bp, Homo sapiens
ggattattatagcaaccattttggggctatatttacatgc

SEQ ID NO: 86435 - DNA, 40 bp, Homo sapiens
gcatgtaaatatagccccaaaatggttgctataataatcc

SEQ ID NO: 86436 - DNA, 40 bp, Homo sapiens
gattattatagcaaccattttggggctatatttacatgct

SEQ ID NO: 86437 - DNA, 40 bp, Homo sapiens
agcatgtaaatatagccccaaaatggttgctataataatc

SEQ ID NO: 86438 - DNA, 40 bp, Homo sapiens
attattatagcaaccattttggggctatatttacatgcta

SEQ ID NO: 86439 - DNA, 40 bp, Homo sapiens
tagcatgtaaatatagccccaaaatggttgctataataat

SEQ ID NO: 86440 - DNA, 40 bp, Homo sapiens
ttattatagcaaccattttggggctatatttacatgctac

SEQ ID NO: 86441 - DNA, 40 bp, Homo sapiens
gtagcatgtaaatatagccccaaaatggttgctataataa

SEQ ID NO: 86442 - DNA, 40 bp, Homo sapiens
tattatagcaaccattttggggctatatttacatgctact

SEQ ID NO: 86443 - DNA, 40 bp, Homo sapiens
agtagcatgtaaatatagccccaaaatggttgctataata

SEQ ID NO: 86444 - DNA, 40 bp, Homo sapiens
attatagcaaccattttggggctatatttacatgctacta

SEQ ID NO: 86445 - DNA, 40 bp, Homo sapiens
tagtagcatgtaaatatagccccaaaatggttgctataat

SEQ ID NO: 86446 - DNA, 40 bp, Homo sapiens
ttatagcaaccattttggggctatatttacatgctactaa

SEQ ID NO: 86447 - DNA, 40 bp, Homo sapiens
ttagtagcatgtaaatatagccccaaaatggttgctataa

SEQ ID NO: 86448 - DNA, 40 bp, Homo sapiens
tatagcaaccattttggggctatatttacatgctactaaa

SEQ ID NO: 86449 - DNA, 40 bp, Homo sapiens
tttagtagcatgtaaatatagccccaaaatggttgctata

SEQ ID NO: 86450 - DNA, 40 bp, Homo sapiens
atagcaaccattttggggctatatttacatgctactaaat

SEQ ID NO: 86451 - DNA, 40 bp, Homo sapiens
atttagtagcatgtaaatatagccccaaaatggttgctat

SEQ ID NO: 86452 - DNA, 40 bp, Homo sapiens
tagcaaccattttggggctatatttacatgctactaaatt

SEQ ID NO: 86453 - DNA, 40 bp, Homo sapiens
aatttagtagcatgtaaatatagccccaaaatggttgcta

SEQ ID NO: 86454 - DNA, 40 bp, Homo sapiens
agcaaccattttggggctatatttacatgctactaaattt

SEQ ID NO: 86455 - DNA, 40 bp, Homo sapiens
aaatttagtagcatgtaaatatagccccaaaatggttgct

SEQ ID NO: 86456 - DNA, 40 bp, Homo sapiens
gcaaccattttggggctatatttacatgctactaaatttt

SEQ ID NO: 86457 - DNA, 40 bp, Homo sapiens
aaaatttagtagcatgtaaatatagccccaaaatggttgc

SEQ ID NO: 86458 - DNA, 40 bp, Homo sapiens
caaccattttggggctatatttacatgctactaaattttt

SEQ ID NO: 86459 - DNA, 40 bp, Homo sapiens
aaaaatttagtagcatgtaaatatagccccaaaatggttg

SEQ ID NO: 86460 - DNA, 40 bp, Homo sapiens
aaccattttggggctatatttacatgctactaaattttta

SEQ ID NO: 86461 - DNA, 40 bp, Homo sapiens
taaaaatttagtagcatgtaaatatagccccaaaatggtt

SEQ ID NO: 86462 - DNA, 40 bp, Homo sapiens
accattttggggctatatttacatgctactaaatttttat

SEQ ID NO: 86463 - DNA, 40 bp, Homo sapiens
ataaaaatttagtagcatgtaaatatagccccaaaatggt

SEQ ID NO: 86464 - DNA, 40 bp, Homo sapiens
ccattttggggctatatttacatgctactaaatttttata

SEQ ID NO: 86465 - DNA, 40 bp, Homo sapiens
tataaaaatttagtagcatgtaaatatagccccaaaatgg

SEQ ID NO: 86466 - DNA, 40 bp, Homo sapiens
cattttggggctatatttacatgctactaaatttttataa

SEQ ID NO: 86467 - DNA, 40 bp, Homo sapiens
ttataaaaatttagtagcatgtaaatatagccccaaaatg

SEQ ID NO: 86468 - DNA, 40 bp, Homo sapiens
attttggggctatatttacatgctactaaatttttataat

SEQ ID NO: 86469 - DNA, 40 bp, Homo sapiens
attataaaaatttagtagcatgtaaatatagccccaaaat

SEQ ID NO: 86470 - DNA, 40 bp, Homo sapiens
ttttggggctatatttacatgctactaaatttttataata

SEQ ID NO: 86471 - DNA, 40 bp, Homo sapiens
tattataaaaatttagtagcatgtaaatatagccccaaaa

SEQ ID NO: 86472 - DNA, 40 bp, Homo sapiens
tttggggctatatttacatgctactaaatttttataataa

SEQ ID NO: 86473 - DNA, 40 bp, Homo sapiens
ttattataaaaatttagtagcatgtaaatatagccccaaa

SEQ ID NO: 86474 - DNA, 40 bp, Homo sapiens
ttggggctatatttacatgctactaaatttttataataat

SEQ ID NO: 86475 - DNA, 40 bp, Homo sapiens
attattataaaaatttagtagcatgtaaatatagccccaa

SEQ ID NO: 86476 - DNA, 40 bp, Homo sapiens
tggggctatatttacatgctactaaatttttataataatt

SEQ ID NO: 86477 - DNA, 40 bp, Homo sapiens
aattattataaaaatttagtagcatgtaaatatagcccca

SEQ ID NO: 86478 - DNA, 40 bp, Homo sapiens
ggggctatatttacatgctactaaatttttataataattg

SEQ ID NO: 86479 - DNA, 40 bp, Homo sapiens
caattattataaaaatttagtagcatgtaaatatagcccc

SEQ ID NO: 86480 - DNA, 40 bp, Homo sapiens
gggctatatttacatgctactaaatttttataataattga

SEQ ID NO: 86481 - DNA, 40 bp, Homo sapiens
tcaattattataaaaatttagtagcatgtaaatatagccc

SEQ ID NO: 86482 - DNA, 40 bp, Homo sapiens
ggctatatttacatgctactaaatttttataataattgaa

SEQ ID NO: 86483 - DNA, 40 bp, Homo sapiens
ttcaattattataaaaatttagtagcatgtaaatatagcc

SEQ ID NO: 86484 - DNA, 40 bp, Homo sapiens
gctatatttacatgctactaaatttttataataattgaaa

SEQ ID NO: 86485 - DNA, 40 bp, Homo sapiens
tttcaattattataaaaatttagtagcatgtaaatatagc

SEQ ID NO: 86486 - DNA, 40 bp, Homo sapiens
ctatatttacatgctactaaatttttataataattgaaaa

SEQ ID NO: 86487 - DNA, 40 bp, Homo sapiens
ttttcaattattataaaaatttagtagcatgtaaatatag

SEQ ID NO: 86488 - DNA, 40 bp, Homo sapiens
tatatttacatgctactaaatttttataataattgaaaag

SEQ ID NO: 86489 - DNA, 40 bp, Homo sapiens
cttttcaattattataaaaatttagtagcatgtaaatata

SEQ ID NO: 86490 - DNA, 40 bp, Homo sapiens
atatttacatgctactaaatttttataataattgaaaaga

SEQ ID NO: 86491 - DNA, 40 bp, Homo sapiens
tcttttcaattattataaaaatttagtagcatgtaaatat

SEQ ID NO: 86492 - DNA, 40 bp, Homo sapiens
tatttacatgctactaaatttttataataattgaaaagat

SEQ ID NO: 86493 - DNA, 40 bp, Homo sapiens
atcttttcaattattataaaaatttagtagcatgtaaata

SEQ ID NO: 86494 - DNA, 40 bp, Homo sapiens
atttacatgctactaaatttttataataattgaaaagatt

SEQ ID NO: 86495 - DNA, 40 bp, Homo sapiens
aatcttttcaattattataaaaatttagtagcatgtaaat

SEQ ID NO: 86496 - DNA, 40 bp, Homo sapiens
tttacatgctactaaatttttataataattgaaaagattt

SEQ ID NO: 86497 - DNA, 40 bp, Homo sapiens
aaatcttttcaattattataaaaatttagtagcatgtaaa

SEQ ID NO: 86498 - DNA, 40 bp, Homo sapiens
ttacatgctactaaatttttataataattgaaaagatttt

SEQ ID NO: 86499 - DNA, 40 bp, Homo sapiens
aaaatcttttcaattattataaaaatttagtagcatgtaa

SEQ ID NO: 86500 - DNA, 40 bp, Homo sapiens
tacatgctactaaatttttataataattgaaaagatttta

SEQ ID NO: 86501 - DNA, 40 bp, Homo sapiens
taaaatcttttcaattattataaaaatttagtagcatgta

SEQ ID NO: 86502 - DNA, 40 bp, Homo sapiens
acatgctactaaatttttataataattgaaaagattttaa

SEQ ID NO: 86503 - DNA, 40 bp, Homo sapiens
ttaaaatcttttcaattattataaaaatttagtagcatgt

SEQ ID NO: 86504 - DNA, 40 bp, Homo sapiens
catgctactaaatttttataataattgaaaagattttaac

SEQ ID NO: 86505 - DNA, 40 bp, Homo sapiens
gttaaaatcttttcaattattataaaaatttagtagcatg

SEQ ID NO: 86506 - DNA, 40 bp, Homo sapiens
atgctactaaatttttataataattgaaaagattttaaca

SEQ ID NO: 86507 - DNA, 40 bp, Homo sapiens
tgttaaaatcttttcaattattataaaaatttagtagcat

SEQ ID NO: 86508 - DNA, 40 bp, Homo sapiens
tgctactaaatttttataataattgaaaagattttaacaa

SEQ ID NO: 86509 - DNA, 40 bp, Homo sapiens
ttgttaaaatcttttcaattattataaaaatttagtagca

SEQ ID NO: 86510 - DNA, 40 bp, Homo sapiens
gctactaaatttttataataattgaaaagattttaacaag

SEQ ID NO: 86511 - DNA, 40 bp, Homo sapiens
cttgttaaaatcttttcaattattataaaaatttagtagc

SEQ ID NO: 86512 - DNA, 40 bp, Homo sapiens
ctactaaatttttataataattgaaaagattttaacaagt

SEQ ID NO: 86513 - DNA, 40 bp, Homo sapiens
acttgttaaaatcttttcaattattataaaaatttagtag

SEQ ID NO: 86514 - DNA, 40 bp, Homo sapiens
tactaaatttttataataattgaaaagattttaacaagta

SEQ ID NO: 86515 - DNA, 40 bp, Homo sapiens
tacttgttaaaatcttttcaattattataaaaatttagta

SEQ ID NO: 86516 - DNA, 40 bp, Homo sapiens
actaaatttttataataattgaaaagattttaacaagtat

SEQ ID NO: 86517 - DNA, 40 bp, Homo sapiens
atacttgttaaaatcttttcaattattataaaaatttagt

SEQ ID NO: 86518 - DNA, 40 bp, Homo sapiens
ctaaatttttataataattgaaaagattttaacaagtata

SEQ ID NO: 86519 - DNA, 40 bp, Homo sapiens
tatacttgttaaaatcttttcaattattataaaaatttag

SEQ ID NO: 86520 - DNA, 40 bp, Homo sapiens
taaatttttataataattgaaaagattttaacaagtataa

SEQ ID NO: 86521 - DNA, 40 bp, Homo sapiens
ttatacttgttaaaatcttttcaattattataaaaattta

SEQ ID NO: 86522 - DNA, 40 bp, Homo sapiens
aaatttttataataattgaaaagattttaacaagtataaa

SEQ ID NO: 86523 - DNA, 40 bp, Homo sapiens
tttatacttgttaaaatcttttcaattattataaaaattt

SEQ ID NO: 86524 - DNA, 40 bp, Homo sapiens
aatttttataataattgaaaagattttaacaagtataaaa

SEQ ID NO: 86525 - DNA, 40 bp, Homo sapiens
ttttatacttgttaaaatcttttcaattattataaaaatt

SEQ ID NO: 86526 - DNA, 40 bp, Homo sapiens
atttttataataattgaaaagattttaacaagtataaaaa

SEQ ID NO: 86527 - DNA, 40 bp, Homo sapiens
tttttatacttgttaaaatcttttcaattattataaaaat

SEQ ID NO: 86528 - DNA, 40 bp, Homo sapiens
tttttataataattgaaaagattttaacaagtataaaaaa

SEQ ID NO: 86529 - DNA, 40 bp, Homo sapiens
ttttttatacttgttaaaatcttttcaattattataaaaa

SEQ ID NO: 86530 - DNA, 40 bp, Homo sapiens
ttttataataattgaaaagattttaacaagtataaaaaat

SEQ ID NO: 86531 - DNA, 40 bp, Homo sapiens
attttttatacttgttaaaatcttttcaattattataaaa

SEQ ID NO: 86532 - DNA, 40 bp, Homo sapiens
tttataataattgaaaagattttaacaagtataaaaaatt

SEQ ID NO: 86533 - DNA, 40 bp, Homo sapiens
aattttttatacttgttaaaatcttttcaattattataaa

SEQ ID NO: 86534 - DNA, 40 bp, Homo sapiens
ttataataattgaaaagattttaacaagtataaaaaattc

SEQ ID NO: 86535 - DNA, 40 bp, Homo sapiens
gaattttttatacttgttaaaatcttttcaattattataa

SEQ ID NO: 86536 - DNA, 40 bp, Homo sapiens
tataataattgaaaagattttaacaagtataaaaaattct

SEQ ID NO: 86537 - DNA, 40 bp, Homo sapiens
agaattttttatacttgttaaaatcttttcaattattata

SEQ ID NO: 86538 - DNA, 40 bp, Homo sapiens
ataataattgaaaagattttaacaagtataaaaaattctc

SEQ ID NO: 86539 - DNA, 40 bp, Homo sapiens
gagaattttttatacttgttaaaatcttttcaattattat

SEQ ID NO: 86540 - DNA, 40 bp, Homo sapiens
taataattgaaaagattttaacaagtataaaaaattctca

SEQ ID NO: 86541 - DNA, 40 bp, Homo sapiens
tgagaattttttatacttgttaaaatcttttcaattatta

SEQ ID NO: 86542 - DNA, 40 bp, Homo sapiens
aataattgaaaagattttaacaagtataaaaaattctcat

SEQ ID NO: 86543 - DNA, 40 bp, Homo sapiens
atgagaattttttatacttgttaaaatcttttcaattatt

SEQ ID NO: 86544 - DNA, 40 bp, Homo sapiens
ataattgaaaagattttaacaagtataaaaaattctcata

SEQ ID NO: 86545 - DNA, 40 bp, Homo sapiens
tatgagaattttttatacttgttaaaatcttttcaattat

SEQ ID NO: 86546 - DNA, 40 bp, Homo sapiens
taattgaaaagattttaacaagtataaaaaattctcatag

SEQ ID NO: 86547 - DNA, 40 bp, Homo sapiens
ctatgagaattttttatacttgttaaaatcttttcaatta

SEQ ID NO: 86548 - DNA, 40 bp, Homo sapiens
aattgaaaagattttaacaagtataaaaaattctcatagg

SEQ ID NO: 86549 - DNA, 40 bp, Homo sapiens
cctatgagaattttttatacttgttaaaatcttttcaatt

SEQ ID NO: 86550 - DNA, 40 bp, Homo sapiens
attgaaaagattttaacaagtataaaaaattctcatagga

SEQ ID NO: 86551 - DNA, 40 bp, Homo sapiens
tcctatgagaattttttatacttgttaaaatcttttcaat

SEQ ID NO: 86552 - DNA, 40 bp, Homo sapiens
ttgaaaagattttaacaagtataaaaaattctcataggaa

SEQ ID NO: 86553 - DNA, 40 bp, Homo sapiens
ttcctatgagaattttttatacttgttaaaatcttttcaa

SEQ ID NO: 86554 - DNA, 40 bp, Homo sapiens
tgaaaagattttaacaagtataaaaaattctcataggaat

SEQ ID NO: 86555 - DNA, 40 bp, Homo sapiens
attcctatgagaattttttatacttgttaaaatcttttca

SEQ ID NO: 86556 - DNA, 40 bp, Homo sapiens
gaaaagattttaacaagtataaaaaattctcataggaatt

SEQ ID NO: 86557 - DNA, 40 bp, Homo sapiens
aattcctatgagaattttttatacttgttaaaatcttttc

SEQ ID NO: 86558 - DNA, 40 bp, Homo sapiens
aaaagattttaacaagtataaaaaattctcataggaatta

SEQ ID NO: 86559 - DNA, 40 bp, Homo sapiens
taattcctatgagaattttttatacttgttaaaatctttt

SEQ ID NO: 86560 - DNA, 40 bp, Homo sapiens
aaagattttaacaagtataaaaaattctcataggaattaa

SEQ ID NO: 86561 - DNA, 40 bp, Homo sapiens
ttaattcctatgagaattttttatacttgttaaaatcttt

SEQ ID NO: 86562 - DNA, 40 bp, Homo sapiens
aagattttaacaagtataaaaaattctcataggaattaaa

SEQ ID NO: 86563 - DNA, 40 bp, Homo sapiens
tttaattcctatgagaattttttatacttgttaaaatctt

SEQ ID NO: 86564 - DNA, 40 bp, Homo sapiens
agattttaacaagtataaaaaattctcataggaattaaat

SEQ ID NO: 86565 - DNA, 40 bp, Homo sapiens
atttaattcctatgagaattttttatacttgttaaaatct

SEQ ID NO: 86566 - DNA, 40 bp, Homo sapiens
gattttaacaagtataaaaaattctcataggaattaaatg

SEQ ID NO: 86567 - DNA, 40 bp, Homo sapiens
catttaattcctatgagaattttttatacttgttaaaatc

SEQ ID NO: 86568 - DNA, 40 bp, Homo sapiens
attttaacaagtataaaaaattctcataggaattaaatgt

SEQ ID NO: 86569 - DNA, 40 bp, Homo sapiens
acatttaattcctatgagaattttttatacttgttaaaat

SEQ ID NO: 86570 - DNA, 40 bp, Homo sapiens
ttttaacaagtataaaaaattctcataggaattaaatgta

SEQ ID NO: 86571 - DNA, 40 bp, Homo sapiens
tacatttaattcctatgagaattttttatacttgttaaaa

SEQ ID NO: 86572 - DNA, 40 bp, Homo sapiens
tttaacaagtataaaaaattctcataggaattaaatgtag

SEQ ID NO: 86573 - DNA, 40 bp, Homo sapiens
ctacatttaattcctatgagaattttttatacttgttaaa

SEQ ID NO: 86574 - DNA, 40 bp, Homo sapiens
ttaacaagtataaaaaattctcataggaattaaatgtagt

SEQ ID NO: 86575 - DNA, 40 bp, Homo sapiens
actacatttaattcctatgagaattttttatacttgttaa

SEQ ID NO: 86576 - DNA, 40 bp, Homo sapiens
taacaagtataaaaaattctcataggaattaaatgtagtc

SEQ ID NO: 86577 - DNA, 40 bp, Homo sapiens
gactacatttaattcctatgagaattttttatacttgtta

SEQ ID NO: 86578 - DNA, 40 bp, Homo sapiens
aacaagtataaaaaattctcataggaattaaatgtagtct

SEQ ID NO: 86579 - DNA, 40 bp, Homo sapiens
agactacatttaattcctatgagaattttttatacttgtt

SEQ ID NO: 86580 - DNA, 40 bp, Homo sapiens
acaagtataaaaaattctcataggaattaaatgtagtctc

SEQ ID NO: 86581 - DNA, 40 bp, Homo sapiens
gagactacatttaattcctatgagaattttttatacttgt

SEQ ID NO: 86582 - DNA, 40 bp, Homo sapiens
caagtataaaaaattctcataggaattaaatgtagtctcc

SEQ ID NO: 86583 - DNA, 40 bp, Homo sapiens
ggagactacatttaattcctatgagaattttttatacttg

SEQ ID NO: 86584 - DNA, 40 bp, Homo sapiens
aagtataaaaaattctcataggaattaaatgtagtctccc

SEQ ID NO: 86585 - DNA, 40 bp, Homo sapiens
gggagactacatttaattcctatgagaattttttatactt

SEQ ID NO: 86586 - DNA, 40 bp, Homo sapiens
agtataaaaaattctcataggaattaaatgtagtctccct

SEQ ID NO: 86587 - DNA, 40 bp, Homo sapiens
agggagactacatttaattcctatgagaattttttatact

SEQ ID NO: 86588 - DNA, 40 bp, Homo sapiens
gtataaaaaattctcataggaattaaatgtagtctccctg

SEQ ID NO: 86589 - DNA, 40 bp, Homo sapiens
cagggagactacatttaattcctatgagaattttttatac

SEQ ID NO: 86590 - DNA, 40 bp, Homo sapiens
tataaaaaattctcataggaattaaatgtagtctccctgt

SEQ ID NO: 86591 - DNA, 40 bp, Homo sapiens
acagggagactacatttaattcctatgagaattttttata

SEQ ID NO: 86592 - DNA, 40 bp, Homo sapiens
ataaaaaattctcataggaattaaatgtagtctccctgtg

SEQ ID NO: 86593 - DNA, 40 bp, Homo sapiens
cacagggagactacatttaattcctatgagaattttttat

SEQ ID NO: 86594 - DNA, 40 bp, Homo sapiens
taaaaaattctcataggaattaaatgtagtctccctgtgt

SEQ ID NO: 86595 - DNA, 40 bp, Homo sapiens
acacagggagactacatttaattcctatgagaatttttta

SEQ ID NO: 86596 - DNA, 40 bp, Homo sapiens
aaaaaattctcataggaattaaatgtagtctccctgtgtc

SEQ ID NO: 86597 - DNA, 40 bp, Homo sapiens
gacacagggagactacatttaattcctatgagaatttttt

SEQ ID NO: 86598 - DNA, 40 bp, Homo sapiens
aaaaattctcataggaattaaatgtagtctccctgtgtca

SEQ ID NO: 86599 - DNA, 40 bp, Homo sapiens
tgacacagggagactacatttaattcctatgagaattttt

SEQ ID NO: 86600 - DNA, 40 bp, Homo sapiens
aaaattctcataggaattaaatgtagtctccctgtgtcag

SEQ ID NO: 86601 - DNA, 40 bp, Homo sapiens
ctgacacagggagactacatttaattcctatgagaatttt

SEQ ID NO: 86602 - DNA, 40 bp, Homo sapiens
aaattctcataggaattaaatgtagtctccctgtgtcaga

SEQ ID NO: 86603 - DNA, 40 bp, Homo sapiens
tctgacacagggagactacatttaattcctatgagaattt

SEQ ID NO: 86604 - DNA, 40 bp, Homo sapiens
aattctcataggaattaaatgtagtctccctgtgtcagac

SEQ ID NO: 86605 - DNA, 40 bp, Homo sapiens
gtctgacacagggagactacatttaattcctatgagaatt

SEQ ID NO: 86606 - DNA, 40 bp, Homo sapiens
attctcataggaattaaatgtagtctccctgtgtcagact

SEQ ID NO: 86607 - DNA, 40 bp, Homo sapiens
agtctgacacagggagactacatttaattcctatgagaat

SEQ ID NO: 86608 - DNA, 40 bp, Homo sapiens
ttctcataggaattaaatgtagtctccctgtgtcagactg

SEQ ID NO: 86609 - DNA, 40 bp, Homo sapiens
cagtctgacacagggagactacatttaattcctatgagaa

SEQ ID NO: 86610 - DNA, 40 bp, Homo sapiens
tctcataggaattaaatgtagtctccctgtgtcagactgc

SEQ ID NO: 86611 - DNA, 40 bp, Homo sapiens
gcagtctgacacagggagactacatttaattcctatgaga

SEQ ID NO: 86612 - DNA, 40 bp, Homo sapiens
ctcataggaattaaatgtagtctccctgtgtcagactgct

SEQ ID NO: 86613 - DNA, 40 bp, Homo sapiens
agcagtctgacacagggagactacatttaattcctatgag

SEQ ID NO: 86614 - DNA, 40 bp, Homo sapiens
tcataggaattaaatgtagtctccctgtgtcagactgctc

SEQ ID NO: 86615 - DNA, 40 bp, Homo sapiens
gagcagtctgacacagggagactacatttaattcctatga

SEQ ID NO: 86616 - DNA, 40 bp, Homo sapiens
cataggaattaaatgtagtctccctgtgtcagactgctct

SEQ ID NO: 86617 - DNA, 40 bp, Homo sapiens
agagcagtctgacacagggagactacatttaattcctatg

SEQ ID NO: 86618 - DNA, 40 bp, Homo sapiens
ataggaattaaatgtagtctccctgtgtcagactgctctt

SEQ ID NO: 86619 - DNA, 40 bp, Homo sapiens
aagagcagtctgacacagggagactacatttaattcctat

SEQ ID NO: 86620 - DNA, 40 bp, Homo sapiens
taggaattaaatgtagtctccctgtgtcagactgctcttt

SEQ ID NO: 86621 - DNA, 40 bp, Homo sapiens
aaagagcagtctgacacagggagactacatttaattccta

SEQ ID NO: 86622 - DNA, 40 bp, Homo sapiens
aggaattaaatgtagtctccctgtgtcagactgctctttc

SEQ ID NO: 86623 - DNA, 40 bp, Homo sapiens
gaaagagcagtctgacacagggagactacatttaattcct

SEQ ID NO: 86624 - DNA, 40 bp, Homo sapiens
ggaattaaatgtagtctccctgtgtcagactgctctttca

SEQ ID NO: 86625 - DNA, 40 bp, Homo sapiens
tgaaagagcagtctgacacagggagactacatttaattcc

SEQ ID NO: 86626 - DNA, 40 bp, Homo sapiens
gaattaaatgtagtctccctgtgtcagactgctctttcat

SEQ ID NO: 86627 - DNA, 40 bp, Homo sapiens
atgaaagagcagtctgacacagggagactacatttaattc

SEQ ID NO: 86628 - DNA, 40 bp, Homo sapiens
aattaaatgtagtctccctgtgtcagactgctctttcata

SEQ ID NO: 86629 - DNA, 40 bp, Homo sapiens
tatgaaagagcagtctgacacagggagactacatttaatt

SEQ ID NO: 86630 - DNA, 40 bp, Homo sapiens
attaaatgtagtctccctgtgtcagactgctctttcatag

SEQ ID NO: 86631 - DNA, 40 bp, Homo sapiens
ctatgaaagagcagtctgacacagggagactacatttaat

SEQ ID NO: 86632 - DNA, 40 bp, Homo sapiens
ttaaatgtagtctccctgtgtcagactgctctttcatagt

SEQ ID NO: 86633 - DNA, 40 bp, Homo sapiens
actatgaaagagcagtctgacacagggagactacatttaa

SEQ ID NO: 86634 - DNA, 40 bp, Homo sapiens
taaatgtagtctccctgtgtcagactgctctttcatagta

SEQ ID NO: 86635 - DNA, 40 bp, Homo sapiens
tactatgaaagagcagtctgacacagggagactacattta

SEQ ID NO: 86636 - DNA, 40 bp, Homo sapiens
aaatgtagtctccctgtgtcagactgctctttcatagtat

SEQ ID NO: 86637 - DNA, 40 bp, Homo sapiens
atactatgaaagagcagtctgacacagggagactacattt

SEQ ID NO: 86638 - DNA, 40 bp, Homo sapiens
aatgtagtctccctgtgtcagactgctctttcatagtata

SEQ ID NO: 86639 - DNA, 40 bp, Homo sapiens
tatactatgaaagagcagtctgacacagggagactacatt

SEQ ID NO: 86640 - DNA, 40 bp, Homo sapiens
atgtagtctccctgtgtcagactgctctttcatagtataa

SEQ ID NO: 86641 - DNA, 40 bp, Homo sapiens
ttatactatgaaagagcagtctgacacagggagactacat

SEQ ID NO: 86642 - DNA, 40 bp, Homo sapiens
tgtagtctccctgtgtcagactgctctttcatagtataac

SEQ ID NO: 86643 - DNA, 40 bp, Homo sapiens
gttatactatgaaagagcagtctgacacagggagactaca

SEQ ID NO: 86644 - DNA, 40 bp, Homo sapiens
gtagtctccctgtgtcagactgctctttcatagtataact

SEQ ID NO: 86645 - DNA, 40 bp, Homo sapiens
agttatactatgaaagagcagtctgacacagggagactac

SEQ ID NO: 86646 - DNA, 40 bp, Homo sapiens
tagtctccctgtgtcagactgctctttcatagtataactt

SEQ ID NO: 86647 - DNA, 40 bp, Homo sapiens
aagttatactatgaaagagcagtctgacacagggagacta

SEQ ID NO: 86648 - DNA, 40 bp, Homo sapiens
agtctccctgtgtcagactgctctttcatagtataacttt

SEQ ID NO: 86649 - DNA, 40 bp, Homo sapiens
aaagttatactatgaaagagcagtctgacacagggagact

SEQ ID NO: 86650 - DNA, 40 bp, Homo sapiens
gtctccctgtgtcagactgctctttcatagtataacttta

SEQ ID NO: 86651 - DNA, 40 bp, Homo sapiens
taaagttatactatgaaagagcagtctgacacagggagac

SEQ ID NO: 86652 - DNA, 40 bp, Homo sapiens
tctccctgtgtcagactgctctttcatagtataactttaa

SEQ ID NO: 86653 - DNA, 40 bp, Homo sapiens
ttaaagttatactatgaaagagcagtctgacacagggaga

SEQ ID NO: 86654 - DNA, 40 bp, Homo sapiens
ctccctgtgtcagactgctctttcatagtataactttaaa

SEQ ID NO: 86655 - DNA, 40 bp, Homo sapiens
tttaaagttatactatgaaagagcagtctgacacagggag

SEQ ID NO: 86656 - DNA, 40 bp, Homo sapiens
tccctgtgtcagactgctctttcatagtataactttaaat

SEQ ID NO: 86657 - DNA, 40 bp, Homo sapiens
atttaaagttatactatgaaagagcagtctgacacaggga

SEQ ID NO: 86658 - DNA, 40 bp, Homo sapiens
ccctgtgtcagactgctctttcatagtataactttaaatc

SEQ ID NO: 86659 - DNA, 40 bp, Homo sapiens
gatttaaagttatactatgaaagagcagtctgacacaggg

SEQ ID NO: 86660 - DNA, 40 bp, Homo sapiens
cctgtgtcagactgctctttcatagtataactttaaatct

SEQ ID NO: 86661 - DNA, 40 bp, Homo sapiens
agatttaaagttatactatgaaagagcagtctgacacagg

SEQ ID NO: 86662 - DNA, 40 bp, Homo sapiens
ctgtgtcagactgctctttcatagtataactttaaatctt

SEQ ID NO: 86663 - DNA, 40 bp, Homo sapiens
aagatttaaagttatactatgaaagagcagtctgacacag

SEQ ID NO: 86664 - DNA, 40 bp, Homo sapiens
tgtgtcagactgctctttcatagtataactttaaatcttt

SEQ ID NO: 86665 - DNA, 40 bp, Homo sapiens
aaagatttaaagttatactatgaaagagcagtctgacaca

SEQ ID NO: 86666 - DNA, 40 bp, Homo sapiens
gtgtcagactgctctttcatagtataactttaaatctttt

SEQ ID NO: 86667 - DNA, 40 bp, Homo sapiens
aaaagatttaaagttatactatgaaagagcagtctgacac

SEQ ID NO: 86668 - DNA, 40 bp, Homo sapiens
tgtcagactgctctttcatagtataactttaaatcttttc

SEQ ID NO: 86669 - DNA, 40 bp, Homo sapiens
gaaaagatttaaagttatactatgaaagagcagtctgaca

SEQ ID NO: 86670 - DNA, 40 bp, Homo sapiens
gtcagactgctctttcatagtataactttaaatcttttct

SEQ ID NO: 86671 - DNA, 40 bp, Homo sapiens
agaaaagatttaaagttatactatgaaagagcagtctgac

SEQ ID NO: 86672 - DNA, 40 bp, Homo sapiens
tcagactgctctttcatagtataactttaaatcttttctt

SEQ ID NO: 86673 - DNA, 40 bp, Homo sapiens
aagaaaagatttaaagttatactatgaaagagcagtctga

SEQ ID NO: 86674 - DNA, 40 bp, Homo sapiens
cagactgctctttcatagtataactttaaatcttttcttc

SEQ ID NO: 86675 - DNA, 40 bp, Homo sapiens
gaagaaaagatttaaagttatactatgaaagagcagtctg

SEQ ID NO: 86676 - DNA, 40 bp, Homo sapiens
agactgctctttcatagtataactttaaatcttttcttca

SEQ ID NO: 86677 - DNA, 40 bp, Homo sapiens
tgaagaaaagatttaaagttatactatgaaagagcagtct

SEQ ID NO: 86678 - DNA, 40 bp, Homo sapiens
gactgctctttcatagtataactttaaatcttttcttcaa

SEQ ID NO: 86679 - DNA, 40 bp, Homo sapiens
ttgaagaaaagatttaaagttatactatgaaagagcagtc

SEQ ID NO: 86680 - DNA, 40 bp, Homo sapiens
actgctctttcatagtataactttaaatcttttcttcaac

SEQ ID NO: 86681 - DNA, 40 bp, Homo sapiens
gttgaagaaaagatttaaagttatactatgaaagagcagt

SEQ ID NO: 86682 - DNA, 40 bp, Homo sapiens
ctgctctttcatagtataactttaaatcttttcttcaact

SEQ ID NO: 86683 - DNA, 40 bp, Homo sapiens
agttgaagaaaagatttaaagttatactatgaaagagcag

SEQ ID NO: 86684 - DNA, 40 bp, Homo sapiens
tgctctttcatagtataactttaaatcttttcttcaactt

SEQ ID NO: 86685 - DNA, 40 bp, Homo sapiens
aagttgaagaaaagatttaaagttatactatgaaagagca

SEQ ID NO: 86686 - DNA, 40 bp, Homo sapiens
gctctttcatagtataactttaaatcttttcttcaacttg

SEQ ID NO: 86687 - DNA, 40 bp, Homo sapiens
caagttgaagaaaagatttaaagttatactatgaaagagc

SEQ ID NO: 86688 - DNA, 40 bp, Homo sapiens
ctctttcatagtataactttaaatcttttcttcaacttga

SEQ ID NO: 86689 - DNA, 40 bp, Homo sapiens
tcaagttgaagaaaagatttaaagttatactatgaaagag

SEQ ID NO: 86690 - DNA, 40 bp, Homo sapiens
tctttcatagtataactttaaatcttttcttcaacttgag

SEQ ID NO: 86691 - DNA, 40 bp, Homo sapiens
ctcaagttgaagaaaagatttaaagttatactatgaaaga

SEQ ID NO: 86692 - DNA, 40 bp, Homo sapiens
ctttcatagtataactttaaatcttttcttcaacttgagt

SEQ ID NO: 86693 - DNA, 40 bp, Homo sapiens
actcaagttgaagaaaagatttaaagttatactatgaaag

SEQ ID NO: 86694 - DNA, 40 bp, Homo sapiens
tttcatagtataactttaaatcttttcttcaacttgagtc

SEQ ID NO: 86695 - DNA, 40 bp, Homo sapiens
gactcaagttgaagaaaagatttaaagttatactatgaaa

SEQ ID NO: 86696 - DNA, 40 bp, Homo sapiens
ttcatagtataactttaaatcttttcttcaacttgagtct

SEQ ID NO: 86697 - DNA, 40 bp, Homo sapiens
agactcaagttgaagaaaagatttaaagttatactatgaa

SEQ ID NO: 86698 - DNA, 40 bp, Homo sapiens
tcatagtataactttaaatcttttcttcaacttgagtctt

SEQ ID NO: 86699 - DNA, 40 bp, Homo sapiens
aagactcaagttgaagaaaagatttaaagttatactatga

SEQ ID NO: 86700 - DNA, 40 bp, Homo sapiens
catagtataactttaaatcttttcttcaacttgagtcttt

SEQ ID NO: 86701 - DNA, 40 bp, Homo sapiens
aaagactcaagttgaagaaaagatttaaagttatactatg

SEQ ID NO: 86702 - DNA, 40 bp, Homo sapiens
atagtataactttaaatcttttcttcaacttgagtctttg

SEQ ID NO: 86703 - DNA, 40 bp, Homo sapiens
caaagactcaagttgaagaaaagatttaaagttatactat

SEQ ID NO: 86704 - DNA, 40 bp, Homo sapiens
tagtataactttaaatcttttcttcaacttgagtctttga

SEQ ID NO: 86705 - DNA, 40 bp, Homo sapiens
tcaaagactcaagttgaagaaaagatttaaagttatacta

SEQ ID NO: 86706 - DNA, 40 bp, Homo sapiens
agtataactttaaatcttttcttcaacttgagtctttgaa

SEQ ID NO: 86707 - DNA, 40 bp, Homo sapiens
ttcaaagactcaagttgaagaaaagatttaaagttatact

SEQ ID NO: 86708 - DNA, 40 bp, Homo sapiens
gtataactttaaatcttttcttcaacttgagtctttgaag

SEQ ID NO: 86709 - DNA, 40 bp, Homo sapiens
cttcaaagactcaagttgaagaaaagatttaaagttatac

SEQ ID NO: 86710 - DNA, 40 bp, Homo sapiens
tataactttaaatcttttcttcaacttgagtctttgaaga

SEQ ID NO: 86711 - DNA, 40 bp, Homo sapiens
tcttcaaagactcaagttgaagaaaagatttaaagttata

SEQ ID NO: 86712 - DNA, 40 bp, Homo sapiens
ataactttaaatcttttcttcaacttgagtctttgaagat

SEQ ID NO: 86713 - DNA, 40 bp, Homo sapiens
atcttcaaagactcaagttgaagaaaagatttaaagttat

SEQ ID NO: 86714 - DNA, 40 bp, Homo sapiens
taactttaaatcttttcttcaacttgagtctttgaagata

SEQ ID NO: 86715 - DNA, 40 bp, Homo sapiens
tatcttcaaagactcaagttgaagaaaagatttaaagtta

SEQ ID NO: 86716 - DNA, 40 bp, Homo sapiens
aactttaaatcttttcttcaacttgagtctttgaagatag

SEQ ID NO: 86717 - DNA, 40 bp, Homo sapiens
ctatcttcaaagactcaagttgaagaaaagatttaaagtt

SEQ ID NO: 86718 - DNA, 40 bp, Homo sapiens
actttaaatcttttcttcaacttgagtctttgaagatagt

SEQ ID NO: 86719 - DNA, 40 bp, Homo sapiens
actatcttcaaagactcaagttgaagaaaagatttaaagt

SEQ ID NO: 86720 - DNA, 40 bp, Homo sapiens
ctttaaatcttttcttcaacttgagtctttgaagatagtt

SEQ ID NO: 86721 - DNA, 40 bp, Homo sapiens
aactatcttcaaagactcaagttgaagaaaagatttaaag

SEQ ID NO: 86722 - DNA, 40 bp, Homo sapiens
tttaaatcttttcttcaacttgagtctttgaagatagttt

SEQ ID NO: 86723 - DNA, 40 bp, Homo sapiens
aaactatcttcaaagactcaagttgaagaaaagatttaaa

SEQ ID NO: 86724 - DNA, 40 bp, Homo sapiens
ttaaatcttttcttcaacttgagtctttgaagatagtttt

SEQ ID NO: 86725 - DNA, 40 bp, Homo sapiens
aaaactatcttcaaagactcaagttgaagaaaagatttaa

SEQ ID NO: 86726 - DNA, 40 bp, Homo sapiens
taaatcttttcttcaacttgagtctttgaagatagtttta

SEQ ID NO: 86727 - DNA, 40 bp, Homo sapiens
taaaactatcttcaaagactcaagttgaagaaaagattta

SEQ ID NO: 86728 - DNA, 40 bp, Homo sapiens
aaatcttttcttcaacttgagtctttgaagatagttttaa

SEQ ID NO: 86729 - DNA, 40 bp, Homo sapiens
ttaaaactatcttcaaagactcaagttgaagaaaagattt

SEQ ID NO: 86730 - DNA, 40 bp, Homo sapiens
aatcttttcttcaacttgagtctttgaagatagttttaat

SEQ ID NO: 86731 - DNA, 40 bp, Homo sapiens
attaaaactatcttcaaagactcaagttgaagaaaagatt

SEQ ID NO: 86732 - DNA, 40 bp, Homo sapiens
atcttttcttcaacttgagtctttgaagatagttttaatt

SEQ ID NO: 86733 - DNA, 40 bp, Homo sapiens
aattaaaactatcttcaaagactcaagttgaagaaaagat

SEQ ID NO: 86734 - DNA, 40 bp, Homo sapiens
tcttttcttcaacttgagtctttgaagatagttttaattc

SEQ ID NO: 86735 - DNA, 40 bp, Homo sapiens
gaattaaaactatcttcaaagactcaagttgaagaaaaga

SEQ ID NO: 86736 - DNA, 40 bp, Homo sapiens
cttttcttcaacttgagtctttgaagatagttttaattct

SEQ ID NO: 86737 - DNA, 40 bp, Homo sapiens
agaattaaaactatcttcaaagactcaagttgaagaaaag

SEQ ID NO: 86738 - DNA, 40 bp, Homo sapiens
ttttcttcaacttgagtctttgaagatagttttaattctg

SEQ ID NO: 86739 - DNA, 40 bp, Homo sapiens
cagaattaaaactatcttcaaagactcaagttgaagaaaa

SEQ ID NO: 86740 - DNA, 40 bp, Homo sapiens
tttcttcaacttgagtctttgaagatagttttaattctgc

SEQ ID NO: 86741 - DNA, 40 bp, Homo sapiens
gcagaattaaaactatcttcaaagactcaagttgaagaaa

SEQ ID NO: 86742 - DNA, 40 bp, Homo sapiens
ttcttcaacttgagtctttgaagatagttttaattctgct

SEQ ID NO: 86743 - DNA, 40 bp, Homo sapiens
agcagaattaaaactatcttcaaagactcaagttgaagaa

SEQ ID NO: 86744 - DNA, 40 bp, Homo sapiens
tcttcaacttgagtctttgaagatagttttaattctgctt

SEQ ID NO: 86745 - DNA, 40 bp, Homo sapiens
aagcagaattaaaactatcttcaaagactcaagttgaaga

SEQ ID NO: 86746 - DNA, 40 bp, Homo sapiens
cttcaacttgagtctttgaagatagttttaattctgcttg

SEQ ID NO: 86747 - DNA, 40 bp, Homo sapiens
caagcagaattaaaactatcttcaaagactcaagttgaag

SEQ ID NO: 86748 - DNA, 40 bp, Homo sapiens
ttcaacttgagtctttgaagatagttttaattctgcttgt

SEQ ID NO: 86749 - DNA, 40 bp, Homo sapiens
acaagcagaattaaaactatcttcaaagactcaagttgaa

SEQ ID NO: 86750 - DNA, 40 bp, Homo sapiens
tcaacttgagtctttgaagatagttttaattctgcttgtg

SEQ ID NO: 86751 - DNA, 40 bp, Homo sapiens
cacaagcagaattaaaactatcttcaaagactcaagttga

SEQ ID NO: 86752 - DNA, 40 bp, Homo sapiens
caacttgagtctttgaagatagttttaattctgcttgtga

SEQ ID NO: 86753 - DNA, 40 bp, Homo sapiens
tcacaagcagaattaaaactatcttcaaagactcaagttg

SEQ ID NO: 86754 - DNA, 40 bp, Homo sapiens
aacttgagtctttgaagatagttttaattctgcttgtgac

SEQ ID NO: 86755 - DNA, 40 bp, Homo sapiens
gtcacaagcagaattaaaactatcttcaaagactcaagtt

SEQ ID NO: 86756 - DNA, 40 bp, Homo sapiens
acttgagtctttgaagatagttttaattctgcttgtgaca

SEQ ID NO: 86757 - DNA, 40 bp, Homo sapiens
tgtcacaagcagaattaaaactatcttcaaagactcaagt

SEQ ID NO: 86758 - DNA, 40 bp, Homo sapiens
cttgagtctttgaagatagttttaattctgcttgtgacat

SEQ ID NO: 86759 - DNA, 40 bp, Homo sapiens
atgtcacaagcagaattaaaactatcttcaaagactcaag

SEQ ID NO: 86760 - DNA, 40 bp, Homo sapiens
ttgagtctttgaagatagttttaattctgcttgtgacatt

SEQ ID NO: 86761 - DNA, 40 bp, Homo sapiens
aatgtcacaagcagaattaaaactatcttcaaagactcaa

SEQ ID NO: 86762 - DNA, 40 bp, Homo sapiens
tgagtctttgaagatagttttaattctgcttgtgacatta

SEQ ID NO: 86763 - DNA, 40 bp, Homo sapiens
taatgtcacaagcagaattaaaactatcttcaaagactca

SEQ ID NO: 86764 - DNA, 40 bp, Homo sapiens
gagtctttgaagatagttttaattctgcttgtgacattaa

SEQ ID NO: 86765 - DNA, 40 bp, Homo sapiens
ttaatgtcacaagcagaattaaaactatcttcaaagactc

SEQ ID NO: 86766 - DNA, 40 bp, Homo sapiens
agtctttgaagatagttttaattctgcttgtgacattaaa

SEQ ID NO: 86767 - DNA, 40 bp, Homo sapiens
tttaatgtcacaagcagaattaaaactatcttcaaagact

SEQ ID NO: 86768 - DNA, 40 bp, Homo sapiens
gtctttgaagatagttttaattctgcttgtgacattaaaa

SEQ ID NO: 86769 - DNA, 40 bp, Homo sapiens
ttttaatgtcacaagcagaattaaaactatcttcaaagac

SEQ ID NO: 86770 - DNA, 40 bp, Homo sapiens
tctttgaagatagttttaattctgcttgtgacattaaaag

SEQ ID NO: 86771 - DNA, 40 bp, Homo sapiens
cttttaatgtcacaagcagaattaaaactatcttcaaaga

SEQ ID NO: 86772 - DNA, 40 bp, Homo sapiens
ctttgaagatagttttaattctgcttgtgacattaaaaga

SEQ ID NO: 86773 - DNA, 40 bp, Homo sapiens
tcttttaatgtcacaagcagaattaaaactatcttcaaag

SEQ ID NO: 86774 - DNA, 40 bp, Homo sapiens
tttgaagatagttttaattctgcttgtgacattaaaagat

SEQ ID NO: 86775 - DNA, 40 bp, Homo sapiens
atcttttaatgtcacaagcagaattaaaactatcttcaaa

SEQ ID NO: 86776 - DNA, 40 bp, Homo sapiens
ttgaagatagttttaattctgcttgtgacattaaaagatt

SEQ ID NO: 86777 - DNA, 40 bp, Homo sapiens
aatcttttaatgtcacaagcagaattaaaactatcttcaa

SEQ ID NO: 86778 - DNA, 40 bp, Homo sapiens
tgaagatagttttaattctgcttgtgacattaaaagatta

SEQ ID NO: 86779 - DNA, 40 bp, Homo sapiens
taatcttttaatgtcacaagcagaattaaaactatcttca

SEQ ID NO: 86780 - DNA, 40 bp, Homo sapiens
gaagatagttttaattctgcttgtgacattaaaagattat

SEQ ID NO: 86781 - DNA, 40 bp, Homo sapiens
ataatcttttaatgtcacaagcagaattaaaactatcttc

SEQ ID NO: 86782 - DNA, 40 bp, Homo sapiens
aagatagttttaattctgcttgtgacattaaaagattatt

SEQ ID NO: 86783 - DNA, 40 bp, Homo sapiens
aataatcttttaatgtcacaagcagaattaaaactatctt

SEQ ID NO: 86784 - DNA, 40 bp, Homo sapiens
agatagttttaattctgcttgtgacattaaaagattattt

SEQ ID NO: 86785 - DNA, 40 bp, Homo sapiens
aaataatcttttaatgtcacaagcagaattaaaactatct

SEQ ID NO: 86786 - DNA, 40 bp, Homo sapiens
gatagttttaattctgcttgtgacattaaaagattatttg

SEQ ID NO: 86787 - DNA, 40 bp, Homo sapiens
caaataatcttttaatgtcacaagcagaattaaaactatc

SEQ ID NO: 86788 - DNA, 40 bp, Homo sapiens
atagttttaattctgcttgtgacattaaaagattatttgg

SEQ ID NO: 86789 - DNA, 40 bp, Homo sapiens
ccaaataatcttttaatgtcacaagcagaattaaaactat

SEQ ID NO: 86790 - DNA, 40 bp, Homo sapiens
tagttttaattctgcttgtgacattaaaagattatttggg

SEQ ID NO: 86791 - DNA, 40 bp, Homo sapiens
cccaaataatcttttaatgtcacaagcagaattaaaacta

SEQ ID NO: 86792 - DNA, 40 bp, Homo sapiens
agttttaattctgcttgtgacattaaaagattatttgggc

SEQ ID NO: 86793 - DNA, 40 bp, Homo sapiens
gcccaaataatcttttaatgtcacaagcagaattaaaact

SEQ ID NO: 86794 - DNA, 40 bp, Homo sapiens
gttttaattctgcttgtgacattaaaagattatttgggcc

SEQ ID NO: 86795 - DNA, 40 bp, Homo sapiens
ggcccaaataatcttttaatgtcacaagcagaattaaaac

SEQ ID NO: 86796 - DNA, 40 bp, Homo sapiens
ttttaattctgcttgtgacattaaaagattatttgggcca

SEQ ID NO: 86797 - DNA, 40 bp, Homo sapiens
tggcccaaataatcttttaatgtcacaagcagaattaaaa

SEQ ID NO: 86798 - DNA, 40 bp, Homo sapiens
tttaattctgcttgtgacattaaaagattatttgggccag

SEQ ID NO: 86799 - DNA, 40 bp, Homo sapiens
ctggcccaaataatcttttaatgtcacaagcagaattaaa

SEQ ID NO: 86800 - DNA, 40 bp, Homo sapiens
ttaattctgcttgtgacattaaaagattatttgggccagt

SEQ ID NO: 86801 - DNA, 40 bp, Homo sapiens
actggcccaaataatcttttaatgtcacaagcagaattaa

SEQ ID NO: 86802 - DNA, 40 bp, Homo sapiens
taattctgcttgtgacattaaaagattatttgggccagtt

SEQ ID NO: 86803 - DNA, 40 bp, Homo sapiens
aactggcccaaataatcttttaatgtcacaagcagaatta

SEQ ID NO: 86804 - DNA, 40 bp, Homo sapiens
aattctgcttgtgacattaaaagattatttgggccagtta

SEQ ID NO: 86805 - DNA, 40 bp, Homo sapiens
taactggcccaaataatcttttaatgtcacaagcagaatt

SEQ ID NO: 86806 - DNA, 40 bp, Homo sapiens
attctgcttgtgacattaaaagattatttgggccagttat

SEQ ID NO: 86807 - DNA, 40 bp, Homo sapiens
ataactggcccaaataatcttttaatgtcacaagcagaat

SEQ ID NO: 86808 - DNA, 40 bp, Homo sapiens
ttctgcttgtgacattaaaagattatttgggccagttata

SEQ ID NO: 86809 - DNA, 40 bp, Homo sapiens
tataactggcccaaataatcttttaatgtcacaagcagaa

SEQ ID NO: 86810 - DNA, 40 bp, Homo sapiens
tctgcttgtgacattaaaagattatttgggccagttatag

SEQ ID NO: 86811 - DNA, 40 bp, Homo sapiens
ctataactggcccaaataatcttttaatgtcacaagcaga

SEQ ID NO: 86812 - DNA, 40 bp, Homo sapiens
ctgcttgtgacattaaaagattatttgggccagttatagc

SEQ ID NO: 86813 - DNA, 40 bp, Homo sapiens
gctataactggcccaaataatcttttaatgtcacaagcag

SEQ ID NO: 86814 - DNA, 40 bp, Homo sapiens
tgcttgtgacattaaaagattatttgggccagttatagct

SEQ ID NO: 86815 - DNA, 40 bp, Homo sapiens
agctataactggcccaaataatcttttaatgtcacaagca

SEQ ID NO: 86816 - DNA, 40 bp, Homo sapiens
gcttgtgacattaaaagattatttgggccagttatagctt

SEQ ID NO: 86817 - DNA, 40 bp, Homo sapiens
aagctataactggcccaaataatcttttaatgtcacaagc

SEQ ID NO: 86818 - DNA, 40 bp, Homo sapiens
cttgtgacattaaaagattatttgggccagttatagctta

SEQ ID NO: 86819 - DNA, 40 bp, Homo sapiens
taagctataactggcccaaataatcttttaatgtcacaag

SEQ ID NO: 86820 - DNA, 40 bp, Homo sapiens
ttgtgacattaaaagattatttgggccagttatagcttat

SEQ ID NO: 86821 - DNA, 40 bp, Homo sapiens
ataagctataactggcccaaataatcttttaatgtcacaa

SEQ ID NO: 86822 - DNA, 40 bp, Homo sapiens
tgtgacattaaaagattatttgggccagttatagcttatt

SEQ ID NO: 86823 - DNA, 40 bp, Homo sapiens
aataagctataactggcccaaataatcttttaatgtcaca

SEQ ID NO: 86824 - DNA, 40 bp, Homo sapiens
gtgacattaaaagattatttgggccagttatagcttatta

SEQ ID NO: 86825 - DNA, 40 bp, Homo sapiens
taataagctataactggcccaaataatcttttaatgtcac

SEQ ID NO: 86826 - DNA, 40 bp, Homo sapiens
tgacattaaaagattatttgggccagttatagcttattag

SEQ ID NO: 86827 - DNA, 40 bp, Homo sapiens
ctaataagctataactggcccaaataatcttttaatgtca

SEQ ID NO: 86828 - DNA, 40 bp, Homo sapiens
gacattaaaagattatttgggccagttatagcttattagg

SEQ ID NO: 86829 - DNA, 40 bp, Homo sapiens
cctaataagctataactggcccaaataatcttttaatgtc

SEQ ID NO: 86830 - DNA, 40 bp, Homo sapiens
acattaaaagattatttgggccagttatagcttattaggt

SEQ ID NO: 86831 - DNA, 40 bp, Homo sapiens
acctaataagctataactggcccaaataatcttttaatgt

SEQ ID NO: 86832 - DNA, 40 bp, Homo sapiens
cattaaaagattatttgggccagttatagcttattaggtg

SEQ ID NO: 86833 - DNA, 40 bp, Homo sapiens
cacctaataagctataactggcccaaataatcttttaatg

SEQ ID NO: 86834 - DNA, 40 bp, Homo sapiens
attaaaagattatttgggccagttatagcttattaggtgt

SEQ ID NO: 86835 - DNA, 40 bp, Homo sapiens
acacctaataagctataactggcccaaataatcttttaat

SEQ ID NO: 86836 - DNA, 40 bp, Homo sapiens
ttaaaagattatttgggccagttatagcttattaggtgtt

SEQ ID NO: 86837 - DNA, 40 bp, Homo sapiens
aacacctaataagctataactggcccaaataatcttttaa

SEQ ID NO: 86838 - DNA, 40 bp, Homo sapiens
taaaagattatttgggccagttatagcttattaggtgttg

SEQ ID NO: 86839 - DNA, 40 bp, Homo sapiens
caacacctaataagctataactggcccaaataatctttta

SEQ ID NO: 86840 - DNA, 40 bp, Homo sapiens
aaaagattatttgggccagttatagcttattaggtgttga

SEQ ID NO: 86841 - DNA, 40 bp, Homo sapiens
tcaacacctaataagctataactggcccaaataatctttt

SEQ ID NO: 86842 - DNA, 40 bp, Homo sapiens
aaagattatttgggccagttatagcttattaggtgttgaa

SEQ ID NO: 86843 - DNA, 40 bp, Homo sapiens
ttcaacacctaataagctataactggcccaaataatcttt

SEQ ID NO: 86844 - DNA, 40 bp, Homo sapiens
aagattatttgggccagttatagcttattaggtgttgaag

SEQ ID NO: 86845 - DNA, 40 bp, Homo sapiens
cttcaacacctaataagctataactggcccaaataatctt

SEQ ID NO: 86846 - DNA, 40 bp, Homo sapiens
agattatttgggccagttatagcttattaggtgttgaaga

SEQ ID NO: 86847 - DNA, 40 bp, Homo sapiens
tcttcaacacctaataagctataactggcccaaataatct

SEQ ID NO: 86848 - DNA, 40 bp, Homo sapiens
gattatttgggccagttatagcttattaggtgttgaagag

SEQ ID NO: 86849 - DNA, 40 bp, Homo sapiens
ctcttcaacacctaataagctataactggcccaaataatc

SEQ ID NO: 86850 - DNA, 40 bp, Homo sapiens
attatttgggccagttatagcttattaggtgttgaagaga

SEQ ID NO: 86851 - DNA, 40 bp, Homo sapiens
tctcttcaacacctaataagctataactggcccaaataat

SEQ ID NO: 86852 - DNA, 40 bp, Homo sapiens
ttatttgggccagttatagcttattaggtgttgaagagac

SEQ ID NO: 86853 - DNA, 40 bp, Homo sapiens
gtctcttcaacacctaataagctataactggcccaaataa

SEQ ID NO: 86854 - DNA, 40 bp, Homo sapiens
tatttgggccagttatagcttattaggtgttgaagagacc

SEQ ID NO: 86855 - DNA, 40 bp, Homo sapiens
ggtctcttcaacacctaataagctataactggcccaaata

SEQ ID NO: 86856 - DNA, 40 bp, Homo sapiens
atttgggccagttatagcttattaggtgttgaagagacca

SEQ ID NO: 86857 - DNA, 40 bp, Homo sapiens
tggtctcttcaacacctaataagctataactggcccaaat

SEQ ID NO: 86858 - DNA, 40 bp, Homo sapiens
tttgggccagttatagcttattaggtgttgaagagaccaa

SEQ ID NO: 86859 - DNA, 40 bp, Homo sapiens
ttggtctcttcaacacctaataagctataactggcccaaa

SEQ ID NO: 86860 - DNA, 40 bp, Homo sapiens
ttgggccagttatagcttattaggtgttgaagagaccaag

SEQ ID NO: 86861 - DNA, 40 bp, Homo sapiens
cttggtctcttcaacacctaataagctataactggcccaa

SEQ ID NO: 86862 - DNA, 40 bp, Homo sapiens
tgggccagttatagcttattaggtgttgaagagaccaagg

SEQ ID NO: 86863 - DNA, 40 bp, Homo sapiens
ccttggtctcttcaacacctaataagctataactggccca

SEQ ID NO: 86864 - DNA, 40 bp, Homo sapiens
gggccagttatagcttattaggtgttgaagagaccaaggt

SEQ ID NO: 86865 - DNA, 40 bp, Homo sapiens
accttggtctcttcaacacctaataagctataactggccc

SEQ ID NO: 86866 - DNA, 40 bp, Homo sapiens
ggccagttatagcttattaggtgttgaagagaccaaggtt

SEQ ID NO: 86867 - DNA, 40 bp, Homo sapiens
aaccttggtctcttcaacacctaataagctataactggcc

SEQ ID NO: 86868 - DNA, 40 bp, Homo sapiens
gccagttatagcttattaggtgttgaagagaccaaggttg

SEQ ID NO: 86869 - DNA, 40 bp, Homo sapiens
caaccttggtctcttcaacacctaataagctataactggc

SEQ ID NO: 86870 - DNA, 40 bp, Homo sapiens
ccagttatagcttattaggtgttgaagagaccaaggttgc

SEQ ID NO: 86871 - DNA, 40 bp, Homo sapiens
gcaaccttggtctcttcaacacctaataagctataactgg

SEQ ID NO: 86872 - DNA, 40 bp, Homo sapiens
cagttatagcttattaggtgttgaagagaccaaggttgca

SEQ ID NO: 86873 - DNA, 40 bp, Homo sapiens
tgcaaccttggtctcttcaacacctaataagctataactg

SEQ ID NO: 86874 - DNA, 40 bp, Homo sapiens
agttatagcttattaggtgttgaagagaccaaggttgcaa

SEQ ID NO: 86875 - DNA, 40 bp, Homo sapiens
ttgcaaccttggtctcttcaacacctaataagctataact

SEQ ID NO: 86876 - DNA, 40 bp, Homo sapiens
gttatagcttattaggtgttgaagagaccaaggttgcaag

SEQ ID NO: 86877 - DNA, 40 bp, Homo sapiens
cttgcaaccttggtctcttcaacacctaataagctataac

SEQ ID NO: 86878 - DNA, 40 bp, Homo sapiens
ttatagcttattaggtgttgaagagaccaaggttgcaagg

SEQ ID NO: 86879 - DNA, 40 bp, Homo sapiens
ccttgcaaccttggtctcttcaacacctaataagctataa

SEQ ID NO: 86880 - DNA, 40 bp, Homo sapiens
tatagcttattaggtgttgaagagaccaaggttgcaaggc

SEQ ID NO: 86881 - DNA, 40 bp, Homo sapiens
gccttgcaaccttggtctcttcaacacctaataagctata

SEQ ID NO: 86882 - DNA, 40 bp, Homo sapiens
atagcttattaggtgttgaagagaccaaggttgcaaggcc

SEQ ID NO: 86883 - DNA, 40 bp, Homo sapiens
ggccttgcaaccttggtctcttcaacacctaataagctat

SEQ ID NO: 86884 - DNA, 40 bp, Homo sapiens
tagcttattaggtgttgaagagaccaaggttgcaaggcca

SEQ ID NO: 86885 - DNA, 40 bp, Homo sapiens
tggccttgcaaccttggtctcttcaacacctaataagcta

SEQ ID NO: 86886 - DNA, 40 bp, Homo sapiens
agcttattaggtgttgaagagaccaaggttgcaaggccag

SEQ ID NO: 86887 - DNA, 40 bp, Homo sapiens
ctggccttgcaaccttggtctcttcaacacctaataagct

SEQ ID NO: 86888 - DNA, 40 bp, Homo sapiens
gcttattaggtgttgaagagaccaaggttgcaaggccagg

SEQ ID NO: 86889 - DNA, 40 bp, Homo sapiens
cctggccttgcaaccttggtctcttcaacacctaataagc

SEQ ID NO: 86890 - DNA, 40 bp, Homo sapiens
cttattaggtgttgaagagaccaaggttgcaaggccaggc

SEQ ID NO: 86891 - DNA, 40 bp, Homo sapiens
gcctggccttgcaaccttggtctcttcaacacctaataag

SEQ ID NO: 86892 - DNA, 40 bp, Homo sapiens
ttattaggtgttgaagagaccaaggttgcaaggccaggcc

SEQ ID NO: 86893 - DNA, 40 bp, Homo sapiens
ggcctggccttgcaaccttggtctcttcaacacctaataa

SEQ ID NO: 86894 - DNA, 40 bp, Homo sapiens
tattaggtgttgaagagaccaaggttgcaaggccaggccc

SEQ ID NO: 86895 - DNA, 40 bp, Homo sapiens
gggcctggccttgcaaccttggtctcttcaacacctaata

SEQ ID NO: 86896 - DNA, 40 bp, Homo sapiens
attaggtgttgaagagaccaaggttgcaaggccaggccct

SEQ ID NO: 86897 - DNA, 40 bp, Homo sapiens
agggcctggccttgcaaccttggtctcttcaacacctaat

SEQ ID NO: 86898 - DNA, 40 bp, Homo sapiens
ttaggtgttgaagagaccaaggttgcaaggccaggccctg

SEQ ID NO: 86899 - DNA, 40 bp, Homo sapiens
cagggcctggccttgcaaccttggtctcttcaacacctaa

SEQ ID NO: 86900 - DNA, 40 bp, Homo sapiens
taggtgttgaagagaccaaggttgcaaggccaggccctgt

SEQ ID NO: 86901 - DNA, 40 bp, Homo sapiens
acagggcctggccttgcaaccttggtctcttcaacaccta

SEQ ID NO: 86902 - DNA, 40 bp, Homo sapiens
aggtgttgaagagaccaaggttgcaaggccaggccctgtg

SEQ ID NO: 86903 - DNA, 40 bp, Homo sapiens
cacagggcctggccttgcaaccttggtctcttcaacacct

SEQ ID NO: 86904 - DNA, 40 bp, Homo sapiens
ggtgttgaagagaccaaggttgcaaggccaggccctgtgt

SEQ ID NO: 86905 - DNA, 40 bp, Homo sapiens
acacagggcctggccttgcaaccttggtctcttcaacacc

SEQ ID NO: 86906 - DNA, 40 bp, Homo sapiens
gtgttgaagagaccaaggttgcaaggccaggccctgtgtg

SEQ ID NO: 86907 - DNA, 40 bp, Homo sapiens
cacacagggcctggccttgcaaccttggtctcttcaacac

SEQ ID NO: 86908 - DNA, 40 bp, Homo sapiens
tgttgaagagaccaaggttgcaaggccaggccctgtgtga

SEQ ID NO: 86909 - DNA, 40 bp, Homo sapiens
tcacacagggcctggccttgcaaccttggtctcttcaaca

SEQ ID NO: 86910 - DNA, 40 bp, Homo sapiens
gttgaagagaccaaggttgcaaggccaggccctgtgtgaa

SEQ ID NO: 86911 - DNA, 40 bp, Homo sapiens
ttcacacagggcctggccttgcaaccttggtctcttcaac

SEQ ID NO: 86912 - DNA, 40 bp, Homo sapiens
ttgaagagaccaaggttgcaaggccaggccctgtgtgaac

SEQ ID NO: 86913 - DNA, 40 bp, Homo sapiens
gttcacacagggcctggccttgcaaccttggtctcttcaa

SEQ ID NO: 86914 - DNA, 40 bp, Homo sapiens
tgaagagaccaaggttgcaaggccaggccctgtgtgaacc

SEQ ID NO: 86915 - DNA, 40 bp, Homo sapiens
ggttcacacagggcctggccttgcaaccttggtctcttca

SEQ ID NO: 86916 - DNA, 40 bp, Homo sapiens
gaagagaccaaggttgcaaggccaggccctgtgtgaacct

SEQ ID NO: 86917 - DNA, 40 bp, Homo sapiens
aggttcacacagggcctggccttgcaaccttggtctcttc

SEQ ID NO: 86918 - DNA, 40 bp, Homo sapiens
aagagaccaaggttgcaaggccaggccctgtgtgaacctt

SEQ ID NO: 86919 - DNA, 40 bp, Homo sapiens
aaggttcacacagggcctggccttgcaaccttggtctctt

SEQ ID NO: 86920 - DNA, 40 bp, Homo sapiens
agagaccaaggttgcaaggccaggccctgtgtgaaccttt

SEQ ID NO: 86921 - DNA, 40 bp, Homo sapiens
aaaggttcacacagggcctggccttgcaaccttggtctct

SEQ ID NO: 86922 - DNA, 40 bp, Homo sapiens
gagaccaaggttgcaaggccaggccctgtgtgaacctttg

SEQ ID NO: 86923 - DNA, 40 bp, Homo sapiens
caaaggttcacacagggcctggccttgcaaccttggtctc

SEQ ID NO: 86924 - DNA, 40 bp, Homo sapiens
agaccaaggttgcaaggccaggccctgtgtgaacctttga

SEQ ID NO: 86925 - DNA, 40 bp, Homo sapiens
tcaaaggttcacacagggcctggccttgcaaccttggtct

SEQ ID NO: 86926 - DNA, 40 bp, Homo sapiens
gaccaaggttgcaaggccaggccctgtgtgaacctttgag

SEQ ID NO: 86927 - DNA, 40 bp, Homo sapiens
ctcaaaggttcacacagggcctggccttgcaaccttggtc

SEQ ID NO: 86928 - DNA, 40 bp, Homo sapiens
accaaggttgcaaggccaggccctgtgtgaacctttgagc

SEQ ID NO: 86929 - DNA, 40 bp, Homo sapiens
gctcaaaggttcacacagggcctggccttgcaaccttggt

SEQ ID NO: 86930 - DNA, 40 bp, Homo sapiens
ccaaggttgcaaggccaggccctgtgtgaacctttgagct

SEQ ID NO: 86931 - DNA, 40 bp, Homo sapiens
agctcaaaggttcacacagggcctggccttgcaaccttgg

SEQ ID NO: 86932 - DNA, 40 bp, Homo sapiens
caaggttgcaaggccaggccctgtgtgaacctttgagctt

SEQ ID NO: 86933 - DNA, 40 bp, Homo sapiens
aagctcaaaggttcacacagggcctggccttgcaaccttg

SEQ ID NO: 86934 - DNA, 40 bp, Homo sapiens
aaggttgcaaggccaggccctgtgtgaacctttgagcttt

SEQ ID NO: 86935 - DNA, 40 bp, Homo sapiens
aaagctcaaaggttcacacagggcctggccttgcaacctt

SEQ ID NO: 86936 - DNA, 40 bp, Homo sapiens
aggttgcaaggccaggccctgtgtgaacctttgagctttc

SEQ ID NO: 86937 - DNA, 40 bp, Homo sapiens
gaaagctcaaaggttcacacagggcctggccttgcaacct

SEQ ID NO: 86938 - DNA, 40 bp, Homo sapiens
ggttgcaaggccaggccctgtgtgaacctttgagctttca

SEQ ID NO: 86939 - DNA, 40 bp, Homo sapiens
tgaaagctcaaaggttcacacagggcctggccttgcaacc

SEQ ID NO: 86940 - DNA, 40 bp, Homo sapiens
gttgcaaggccaggccctgtgtgaacctttgagctttcat

SEQ ID NO: 86941 - DNA, 40 bp, Homo sapiens
atgaaagctcaaaggttcacacagggcctggccttgcaac

SEQ ID NO: 86942 - DNA, 40 bp, Homo sapiens
ttgcaaggccaggccctgtgtgaacctttgagctttcata

SEQ ID NO: 86943 - DNA, 40 bp, Homo sapiens
tatgaaagctcaaaggttcacacagggcctggccttgcaa

SEQ ID NO: 86944 - DNA, 40 bp, Homo sapiens
tgcaaggccaggccctgtgtgaacctttgagctttcatag

SEQ ID NO: 86945 - DNA, 40 bp, Homo sapiens
ctatgaaagctcaaaggttcacacagggcctggccttgca

SEQ ID NO: 86946 - DNA, 40 bp, Homo sapiens
gcaaggccaggccctgtgtgaacctttgagctttcataga

SEQ ID NO: 86947 - DNA, 40 bp, Homo sapiens
tctatgaaagctcaaaggttcacacagggcctggccttgc

SEQ ID NO: 86948 - DNA, 40 bp, Homo sapiens
caaggccaggccctgtgtgaacctttgagctttcatagag

SEQ ID NO: 86949 - DNA, 40 bp, Homo sapiens
ctctatgaaagctcaaaggttcacacagggcctggccttg

SEQ ID NO: 86950 - DNA, 40 bp, Homo sapiens
aaggccaggccctgtgtgaacctttgagctttcatagaga

SEQ ID NO: 86951 - DNA, 40 bp, Homo sapiens
tctctatgaaagctcaaaggttcacacagggcctggcctt

SEQ ID NO: 86952 - DNA, 40 bp, Homo sapiens
aggccaggccctgtgtgaacctttgagctttcatagagag

SEQ ID NO: 86953 - DNA, 40 bp, Homo sapiens
ctctctatgaaagctcaaaggttcacacagggcctggcct

SEQ ID NO: 86954 - DNA, 40 bp, Homo sapiens
ggccaggccctgtgtgaacctttgagctttcatagagagt

SEQ ID NO: 86955 - DNA, 40 bp, Homo sapiens
actctctatgaaagctcaaaggttcacacagggcctggcc

SEQ ID NO: 86956 - DNA, 40 bp, Homo sapiens
gccaggccctgtgtgaacctttgagctttcatagagagtt

SEQ ID NO: 86957 - DNA, 40 bp, Homo sapiens
aactctctatgaaagctcaaaggttcacacagggcctggc

SEQ ID NO: 86958 - DNA, 40 bp, Homo sapiens
ccaggccctgtgtgaacctttgagctttcatagagagttt

SEQ ID NO: 86959 - DNA, 40 bp, Homo sapiens
aaactctctatgaaagctcaaaggttcacacagggcctgg

SEQ ID NO: 86960 - DNA, 40 bp, Homo sapiens
caggccctgtgtgaacctttgagctttcatagagagtttc

SEQ ID NO: 86961 - DNA, 40 bp, Homo sapiens
gaaactctctatgaaagctcaaaggttcacacagggcctg

SEQ ID NO: 86962 - DNA, 40 bp, Homo sapiens
aggccctgtgtgaacctttgagctttcatagagagtttca

SEQ ID NO: 86963 - DNA, 40 bp, Homo sapiens
tgaaactctctatgaaagctcaaaggttcacacagggcct

SEQ ID NO: 86964 - DNA, 40 bp, Homo sapiens
ggccctgtgtgaacctttgagctttcatagagagtttcac

SEQ ID NO: 86965 - DNA, 40 bp, Homo sapiens
gtgaaactctctatgaaagctcaaaggttcacacagggcc

SEQ ID NO: 86966 - DNA, 40 bp, Homo sapiens
gccctgtgtgaacctttgagctttcatagagagtttcaca

SEQ ID NO: 86967 - DNA, 40 bp, Homo sapiens
tgtgaaactctctatgaaagctcaaaggttcacacagggc

SEQ ID NO: 86968 - DNA, 40 bp, Homo sapiens
ccctgtgtgaacctttgagctttcatagagagtttcacag

SEQ ID NO: 86969 - DNA, 40 bp, Homo sapiens
ctgtgaaactctctatgaaagctcaaaggttcacacaggg

SEQ ID NO: 86970 - DNA, 40 bp, Homo sapiens
cctgtgtgaacctttgagctttcatagagagtttcacagc

SEQ ID NO: 86971 - DNA, 40 bp, Homo sapiens
gctgtgaaactctctatgaaagctcaaaggttcacacagg

SEQ ID NO: 86972 - DNA, 40 bp, Homo sapiens
ctgtgtgaacctttgagctttcatagagagtttcacagca

SEQ ID NO: 86973 - DNA, 40 bp, Homo sapiens
tgctgtgaaactctctatgaaagctcaaaggttcacacag

SEQ ID NO: 86974 - DNA, 40 bp, Homo sapiens
tgtgtgaacctttgagctttcatagagagtttcacagcat

SEQ ID NO: 86975 - DNA, 40 bp, Homo sapiens
atgctgtgaaactctctatgaaagctcaaaggttcacaca

SEQ ID NO: 86976 - DNA, 40 bp, Homo sapiens
gtgtgaacctttgagctttcatagagagtttcacagcatg

SEQ ID NO: 86977 - DNA, 40 bp, Homo sapiens
catgctgtgaaactctctatgaaagctcaaaggttcacac

SEQ ID NO: 86978 - DNA, 40 bp, Homo sapiens
tgtgaacctttgagctttcatagagagtttcacagcatgg

SEQ ID NO: 86979 - DNA, 40 bp, Homo sapiens
ccatgctgtgaaactctctatgaaagctcaaaggttcaca

SEQ ID NO: 86980 - DNA, 40 bp, Homo sapiens
gtgaacctttgagctttcatagagagtttcacagcatgga

SEQ ID NO: 86981 - DNA, 40 bp, Homo sapiens
tccatgctgtgaaactctctatgaaagctcaaaggttcac

SEQ ID NO: 86982 - DNA, 40 bp, Homo sapiens
tgaacctttgagctttcatagagagtttcacagcatggac

SEQ ID NO: 86983 - DNA, 40 bp, Homo sapiens
gtccatgctgtgaaactctctatgaaagctcaaaggttca

SEQ ID NO: 86984 - DNA, 40 bp, Homo sapiens
gaacctttgagctttcatagagagtttcacagcatggact

SEQ ID NO: 86985 - DNA, 40 bp, Homo sapiens
agtccatgctgtgaaactctctatgaaagctcaaaggttc

SEQ ID NO: 86986 - DNA, 40 bp, Homo sapiens
aacctttgagctttcatagagagtttcacagcatggactg

SEQ ID NO: 86987 - DNA, 40 bp, Homo sapiens
cagtccatgctgtgaaactctctatgaaagctcaaaggtt

SEQ ID NO: 86988 - DNA, 40 bp, Homo sapiens
acctttgagctttcatagagagtttcacagcatggactgt

SEQ ID NO: 86989 - DNA, 40 bp, Homo sapiens
acagtccatgctgtgaaactctctatgaaagctcaaaggt

SEQ ID NO: 86990 - DNA, 40 bp, Homo sapiens
cctttgagctttcatagagagtttcacagcatggactgtg

SEQ ID NO: 86991 - DNA, 40 bp, Homo sapiens
cacagtccatgctgtgaaactctctatgaaagctcaaagg

SEQ ID NO: 86992 - DNA, 40 bp, Homo sapiens
ctttgagctttcatagagagtttcacagcatggactgtgt

SEQ ID NO: 86993 - DNA, 40 bp, Homo sapiens
acacagtccatgctgtgaaactctctatgaaagctcaaag

SEQ ID NO: 86994 - DNA, 40 bp, Homo sapiens
tttgagctttcatagagagtttcacagcatggactgtgtc

SEQ ID NO: 86995 - DNA, 40 bp, Homo sapiens
gacacagtccatgctgtgaaactctctatgaaagctcaaa

SEQ ID NO: 86996 - DNA, 40 bp, Homo sapiens
ttgagctttcatagagagtttcacagcatggactgtgtcc

SEQ ID NO: 86997 - DNA, 40 bp, Homo sapiens
ggacacagtccatgctgtgaaactctctatgaaagctcaa

SEQ ID NO: 86998 - DNA, 40 bp, Homo sapiens
tgagctttcatagagagtttcacagcatggactgtgtccc

SEQ ID NO: 86999 - DNA, 40 bp, Homo sapiens
gggacacagtccatgctgtgaaactctctatgaaagctca

SEQ ID NO: 87000 - DNA, 40 bp, Homo sapiens
gagctttcatagagagtttcacagcatggactgtgtcccc

SEQ ID NO: 87001 - DNA, 40 bp, Homo sapiens
ggggacacagtccatgctgtgaaactctctatgaaagctc

SEQ ID NO: 87002 - DNA, 40 bp, Homo sapiens
agctttcatagagagtttcacagcatggactgtgtcccca

SEQ ID NO: 87003 - DNA, 40 bp, Homo sapiens
tggggacacagtccatgctgtgaaactctctatgaaagct

SEQ ID NO: 87004 - DNA, 40 bp, Homo sapiens
gctttcatagagagtttcacagcatggactgtgtccccac

SEQ ID NO: 87005 - DNA, 40 bp, Homo sapiens
gtggggacacagtccatgctgtgaaactctctatgaaagc

SEQ ID NO: 87006 - DNA, 40 bp, Homo sapiens
ctttcatagagagtttcacagcatggactgtgtccccacg

SEQ ID NO: 87007 - DNA, 40 bp, Homo sapiens
cgtggggacacagtccatgctgtgaaactctctatgaaag

SEQ ID NO: 87008 - DNA, 40 bp, Homo sapiens
tttcatagagagtttcacagcatggactgtgtccccacgg

SEQ ID NO: 87009 - DNA, 40 bp, Homo sapiens
ccgtggggacacagtccatgctgtgaaactctctatgaaa

SEQ ID NO: 87010 - DNA, 40 bp, Homo sapiens
ttcatagagagtttcacagcatggactgtgtccccacggt

SEQ ID NO: 87011 - DNA, 40 bp, Homo sapiens
accgtggggacacagtccatgctgtgaaactctctatgaa

SEQ ID NO: 87012 - DNA, 40 bp, Homo sapiens
tcatagagagtttcacagcatggactgtgtccccacggtc

SEQ ID NO: 87013 - DNA, 40 bp, Homo sapiens
gaccgtggggacacagtccatgctgtgaaactctctatga

SEQ ID NO: 87014 - DNA, 40 bp, Homo sapiens
catagagagtttcacagcatggactgtgtccccacggtca

SEQ ID NO: 87015 - DNA, 40 bp, Homo sapiens
tgaccgtggggacacagtccatgctgtgaaactctctatg

SEQ ID NO: 87016 - DNA, 40 bp, Homo sapiens
atagagagtttcacagcatggactgtgtccccacggtcat

SEQ ID NO: 87017 - DNA, 40 bp, Homo sapiens
atgaccgtggggacacagtccatgctgtgaaactctctat

SEQ ID NO: 87018 - DNA, 40 bp, Homo sapiens
tagagagtttcacagcatggactgtgtccccacggtcatc

SEQ ID NO: 87019 - DNA, 40 bp, Homo sapiens
gatgaccgtggggacacagtccatgctgtgaaactctcta

SEQ ID NO: 87020 - DNA, 40 bp, Homo sapiens
agagagtttcacagcatggactgtgtccccacggtcatcc

SEQ ID NO: 87021 - DNA, 40 bp, Homo sapiens
ggatgaccgtggggacacagtccatgctgtgaaactctct

SEQ ID NO: 87022 - DNA, 40 bp, Homo sapiens
gagagtttcacagcatggactgtgtccccacggtcatcca

SEQ ID NO: 87023 - DNA, 40 bp, Homo sapiens
tggatgaccgtggggacacagtccatgctgtgaaactctc

SEQ ID NO: 87024 - DNA, 40 bp, Homo sapiens
agagtttcacagcatggactgtgtccccacggtcatccag

SEQ ID NO: 87025 - DNA, 40 bp, Homo sapiens
ctggatgaccgtggggacacagtccatgctgtgaaactct

SEQ ID NO: 87026 - DNA, 40 bp, Homo sapiens
gagtttcacagcatggactgtgtccccacggtcatccagt

SEQ ID NO: 87027 - DNA, 40 bp, Homo sapiens
actggatgaccgtggggacacagtccatgctgtgaaactc

SEQ ID NO: 87028 - DNA, 40 bp, Homo sapiens
agtttcacagcatggactgtgtccccacggtcatccagtg

SEQ ID NO: 87029 - DNA, 40 bp, Homo sapiens
cactggatgaccgtggggacacagtccatgctgtgaaact

SEQ ID NO: 87030 - DNA, 40 bp, Homo sapiens
gtttcacagcatggactgtgtccccacggtcatccagtgt

SEQ ID NO: 87031 - DNA, 40 bp, Homo sapiens
acactggatgaccgtggggacacagtccatgctgtgaaac

SEQ ID NO: 87032 - DNA, 40 bp, Homo sapiens
tttcacagcatggactgtgtccccacggtcatccagtgtt

SEQ ID NO: 87033 - DNA, 40 bp, Homo sapiens
aacactggatgaccgtggggacacagtccatgctgtgaaa

SEQ ID NO: 87034 - DNA, 40 bp, Homo sapiens
ttcacagcatggactgtgtccccacggtcatccagtgttg

SEQ ID NO: 87035 - DNA, 40 bp, Homo sapiens
caacactggatgaccgtggggacacagtccatgctgtgaa

SEQ ID NO: 87036 - DNA, 40 bp, Homo sapiens
tcacagcatggactgtgtccccacggtcatccagtgttgt

SEQ ID NO: 87037 - DNA, 40 bp, Homo sapiens
acaacactggatgaccgtggggacacagtccatgctgtga

SEQ ID NO: 87038 - DNA, 40 bp, Homo sapiens
cacagcatggactgtgtccccacggtcatccagtgttgtc

SEQ ID NO: 87039 - DNA, 40 bp, Homo sapiens
gacaacactggatgaccgtggggacacagtccatgctgtg

SEQ ID NO: 87040 - DNA, 40 bp, Homo sapiens
acagcatggactgtgtccccacggtcatccagtgttgtca

SEQ ID NO: 87041 - DNA, 40 bp, Homo sapiens
tgacaacactggatgaccgtggggacacagtccatgctgt

SEQ ID NO: 87042 - DNA, 40 bp, Homo sapiens
cagcatggactgtgtccccacggtcatccagtgttgtcat

SEQ ID NO: 87043 - DNA, 40 bp, Homo sapiens
atgacaacactggatgaccgtggggacacagtccatgctg

SEQ ID NO: 87044 - DNA, 40 bp, Homo sapiens
agcatggactgtgtccccacggtcatccagtgttgtcatg

SEQ ID NO: 87045 - DNA, 40 bp, Homo sapiens
catgacaacactggatgaccgtggggacacagtccatgct

SEQ ID NO: 87046 - DNA, 40 bp, Homo sapiens
gcatggactgtgtccccacggtcatccagtgttgtcatgc

SEQ ID NO: 87047 - DNA, 40 bp, Homo sapiens
gcatgacaacactggatgaccgtggggacacagtccatgc

SEQ ID NO: 87048 - DNA, 40 bp, Homo sapiens
catggactgtgtccccacggtcatccagtgttgtcatgca

SEQ ID NO: 87049 - DNA, 40 bp, Homo sapiens
tgcatgacaacactggatgaccgtggggacacagtccatg

SEQ ID NO: 87050 - DNA, 40 bp, Homo sapiens
atggactgtgtccccacggtcatccagtgttgtcatgcat

SEQ ID NO: 87051 - DNA, 40 bp, Homo sapiens
atgcatgacaacactggatgaccgtggggacacagtccat

SEQ ID NO: 87052 - DNA, 40 bp, Homo sapiens
tggactgtgtccccacggtcatccagtgttgtcatgcatt

SEQ ID NO: 87053 - DNA, 40 bp, Homo sapiens
aatgcatgacaacactggatgaccgtggggacacagtcca

SEQ ID NO: 87054 - DNA, 40 bp, Homo sapiens
ggactgtgtccccacggtcatccagtgttgtcatgcattg

SEQ ID NO: 87055 - DNA, 40 bp, Homo sapiens
caatgcatgacaacactggatgaccgtggggacacagtcc

SEQ ID NO: 87056 - DNA, 40 bp, Homo sapiens
gactgtgtccccacggtcatccagtgttgtcatgcattgg

SEQ ID NO: 87057 - DNA, 40 bp, Homo sapiens
ccaatgcatgacaacactggatgaccgtggggacacagtc

SEQ ID NO: 87058 - DNA, 40 bp, Homo sapiens
actgtgtccccacggtcatccagtgttgtcatgcattggt

SEQ ID NO: 87059 - DNA, 40 bp, Homo sapiens
accaatgcatgacaacactggatgaccgtggggacacagt

SEQ ID NO: 87060 - DNA, 40 bp, Homo sapiens
ctgtgtccccacggtcatccagtgttgtcatgcattggtt

SEQ ID NO: 87061 - DNA, 40 bp, Homo sapiens
aaccaatgcatgacaacactggatgaccgtggggacacag

SEQ ID NO: 87062 - DNA, 40 bp, Homo sapiens
tgtgtccccacggtcatccagtgttgtcatgcattggtta

SEQ ID NO: 87063 - DNA, 40 bp, Homo sapiens
taaccaatgcatgacaacactggatgaccgtggggacaca

SEQ ID NO: 87064 - DNA, 40 bp, Homo sapiens
gtgtccccacggtcatccagtgttgtcatgcattggttag

SEQ ID NO: 87065 - DNA, 40 bp, Homo sapiens
ctaaccaatgcatgacaacactggatgaccgtggggacac

SEQ ID NO: 87066 - DNA, 40 bp, Homo sapiens
tgtccccacggtcatccagtgttgtcatgcattggttagt

SEQ ID NO: 87067 - DNA, 40 bp, Homo sapiens
actaaccaatgcatgacaacactggatgaccgtggggaca

SEQ ID NO: 87068 - DNA, 40 bp, Homo sapiens
gtccccacggtcatccagtgttgtcatgcattggttagtc

SEQ ID NO: 87069 - DNA, 40 bp, Homo sapiens
gactaaccaatgcatgacaacactggatgaccgtggggac

SEQ ID NO: 87070 - DNA, 40 bp, Homo sapiens
tccccacggtcatccagtgttgtcatgcattggttagtca

SEQ ID NO: 87071 - DNA, 40 bp, Homo sapiens
tgactaaccaatgcatgacaacactggatgaccgtgggga

SEQ ID NO: 87072 - DNA, 40 bp, Homo sapiens
ccccacggtcatccagtgttgtcatgcattggttagtcaa

SEQ ID NO: 87073 - DNA, 40 bp, Homo sapiens
ttgactaaccaatgcatgacaacactggatgaccgtgggg

SEQ ID NO: 87074 - DNA, 40 bp, Homo sapiens
cccacggtcatccagtgttgtcatgcattggttagtcaaa

SEQ ID NO: 87075 - DNA, 40 bp, Homo sapiens
tttgactaaccaatgcatgacaacactggatgaccgtggg

SEQ ID NO: 87076 - DNA, 40 bp, Homo sapiens
ccacggtcatccagtgttgtcatgcattggttagtcaaaa

SEQ ID NO: 87077 - DNA, 40 bp, Homo sapiens
ttttgactaaccaatgcatgacaacactggatgaccgtgg

SEQ ID NO: 87078 - DNA, 40 bp, Homo sapiens
cacggtcatccagtgttgtcatgcattggttagtcaaaat

SEQ ID NO: 87079 - DNA, 40 bp, Homo sapiens
attttgactaaccaatgcatgacaacactggatgaccgtg

SEQ ID NO: 87080 - DNA, 40 bp, Homo sapiens
acggtcatccagtgttgtcatgcattggttagtcaaaatg

SEQ ID NO: 87081 - DNA, 40 bp, Homo sapiens
cattttgactaaccaatgcatgacaacactggatgaccgt

SEQ ID NO: 87082 - DNA, 40 bp, Homo sapiens
cggtcatccagtgttgtcatgcattggttagtcaaaatgg

SEQ ID NO: 87083 - DNA, 40 bp, Homo sapiens
ccattttgactaaccaatgcatgacaacactggatgaccg

SEQ ID NO: 87084 - DNA, 40 bp, Homo sapiens
ggtcatccagtgttgtcatgcattggttagtcaaaatggg

SEQ ID NO: 87085 - DNA, 40 bp, Homo sapiens
cccattttgactaaccaatgcatgacaacactggatgacc

SEQ ID NO: 87086 - DNA, 40 bp, Homo sapiens
gtcatccagtgttgtcatgcattggttagtcaaaatgggg

SEQ ID NO: 87087 - DNA, 40 bp, Homo sapiens
ccccattttgactaaccaatgcatgacaacactggatgac

SEQ ID NO: 87088 - DNA, 40 bp, Homo sapiens
tcatccagtgttgtcatgcattggttagtcaaaatgggga

SEQ ID NO: 87089 - DNA, 40 bp, Homo sapiens
tccccattttgactaaccaatgcatgacaacactggatga

SEQ ID NO: 87090 - DNA, 40 bp, Homo sapiens
catccagtgttgtcatgcattggttagtcaaaatggggag

SEQ ID NO: 87091 - DNA, 40 bp, Homo sapiens
ctccccattttgactaaccaatgcatgacaacactggatg

SEQ ID NO: 87092 - DNA, 40 bp, Homo sapiens
atccagtgttgtcatgcattggttagtcaaaatggggagg

SEQ ID NO: 87093 - DNA, 40 bp, Homo sapiens
cctccccattttgactaaccaatgcatgacaacactggat

SEQ ID NO: 87094 - DNA, 40 bp, Homo sapiens
tccagtgttgtcatgcattggttagtcaaaatggggaggg

SEQ ID NO: 87095 - DNA, 40 bp, Homo sapiens
ccctccccattttgactaaccaatgcatgacaacactgga

SEQ ID NO: 87096 - DNA, 40 bp, Homo sapiens
ccagtgttgtcatgcattggttagtcaaaatggggaggga

SEQ ID NO: 87097 - DNA, 40 bp, Homo sapiens
tccctccccattttgactaaccaatgcatgacaacactgg

SEQ ID NO: 87098 - DNA, 40 bp, Homo sapiens
cagtgttgtcatgcattggttagtcaaaatggggagggac

SEQ ID NO: 87099 - DNA, 40 bp, Homo sapiens
gtccctccccattttgactaaccaatgcatgacaacactg

SEQ ID NO: 87100 - DNA, 40 bp, Homo sapiens
agtgttgtcatgcattggttagtcaaaatggggagggact

SEQ ID NO: 87101 - DNA, 40 bp, Homo sapiens
agtccctccccattttgactaaccaatgcatgacaacact

SEQ ID NO: 87102 - DNA, 40 bp, Homo sapiens
gtgttgtcatgcattggttagtcaaaatggggagggacta

SEQ ID NO: 87103 - DNA, 40 bp, Homo sapiens
tagtccctccccattttgactaaccaatgcatgacaacac

SEQ ID NO: 87104 - DNA, 40 bp, Homo sapiens
tgttgtcatgcattggttagtcaaaatggggagggactag

SEQ ID NO: 87105 - DNA, 40 bp, Homo sapiens
ctagtccctccccattttgactaaccaatgcatgacaaca

SEQ ID NO: 87106 - DNA, 40 bp, Homo sapiens
gttgtcatgcattggttagtcaaaatggggagggactagg

SEQ ID NO: 87107 - DNA, 40 bp, Homo sapiens
cctagtccctccccattttgactaaccaatgcatgacaac

SEQ ID NO: 87108 - DNA, 40 bp, Homo sapiens
ttgtcatgcattggttagtcaaaatggggagggactaggg

SEQ ID NO: 87109 - DNA, 40 bp, Homo sapiens
ccctagtccctccccattttgactaaccaatgcatgacaa

SEQ ID NO: 87110 - DNA, 40 bp, Homo sapiens
tgtcatgcattggttagtcaaaatggggagggactagggc

SEQ ID NO: 87111 - DNA, 40 bp, Homo sapiens
gccctagtccctccccattttgactaaccaatgcatgaca

SEQ ID NO: 87112 - DNA, 40 bp, Homo sapiens
gtcatgcattggttagtcaaaatggggagggactagggca

SEQ ID NO: 87113 - DNA, 40 bp, Homo sapiens
tgccctagtccctccccattttgactaaccaatgcatgac

SEQ ID NO: 87114 - DNA, 40 bp, Homo sapiens
tcatgcattggttagtcaaaatggggagggactagggcag

SEQ ID NO: 87115 - DNA, 40 bp, Homo sapiens
ctgccctagtccctccccattttgactaaccaatgcatga

SEQ ID NO: 87116 - DNA, 40 bp, Homo sapiens
catgcattggttagtcaaaatggggagggactagggcagt

SEQ ID NO: 87117 - DNA, 40 bp, Homo sapiens
actgccctagtccctccccattttgactaaccaatgcatg

SEQ ID NO: 87118 - DNA, 40 bp, Homo sapiens
atgcattggttagtcaaaatggggagggactagggcagtt

SEQ ID NO: 87119 - DNA, 40 bp, Homo sapiens
aactgccctagtccctccccattttgactaaccaatgcat

SEQ ID NO: 87120 - DNA, 40 bp, Homo sapiens
tgcattggttagtcaaaatggggagggactagggcagttt

SEQ ID NO: 87121 - DNA, 40 bp, Homo sapiens
aaactgccctagtccctccccattttgactaaccaatgca

SEQ ID NO: 87122 - DNA, 40 bp, Homo sapiens
gcattggttagtcaaaatggggagggactagggcagtttg

SEQ ID NO: 87123 - DNA, 40 bp, Homo sapiens
caaactgccctagtccctccccattttgactaaccaatgc

SEQ ID NO: 87124 - DNA, 40 bp, Homo sapiens
cattggttagtcaaaatggggagggactagggcagtttgg

SEQ ID NO: 87125 - DNA, 40 bp, Homo sapiens
ccaaactgccctagtccctccccattttgactaaccaatg

SEQ ID NO: 87126 - DNA, 40 bp, Homo sapiens
attggttagtcaaaatggggagggactagggcagtttgga

SEQ ID NO: 87127 - DNA, 40 bp, Homo sapiens
tccaaactgccctagtccctccccattttgactaaccaat

SEQ ID NO: 87128 - DNA, 40 bp, Homo sapiens
ttggttagtcaaaatggggagggactagggcagtttggat

SEQ ID NO: 87129 - DNA, 40 bp, Homo sapiens
atccaaactgccctagtccctccccattttgactaaccaa

SEQ ID NO: 87130 - DNA, 40 bp, Homo sapiens
tggttagtcaaaatggggagggactagggcagtttggata

SEQ ID NO: 87131 - DNA, 40 bp, Homo sapiens
tatccaaactgccctagtccctccccattttgactaacca

SEQ ID NO: 87132 - DNA, 40 bp, Homo sapiens
ggttagtcaaaatggggagggactagggcagtttggatag

SEQ ID NO: 87133 - DNA, 40 bp, Homo sapiens
ctatccaaactgccctagtccctccccattttgactaacc

SEQ ID NO: 87134 - DNA, 40 bp, Homo sapiens
gttagtcaaaatggggagggactagggcagtttggatagc

SEQ ID NO: 87135 - DNA, 40 bp, Homo sapiens
gctatccaaactgccctagtccctccccattttgactaac

SEQ ID NO: 87136 - DNA, 40 bp, Homo sapiens
ttagtcaaaatggggagggactagggcagtttggatagct

SEQ ID NO: 87137 - DNA, 40 bp, Homo sapiens
agctatccaaactgccctagtccctccccattttgactaa

SEQ ID NO: 87138 - DNA, 40 bp, Homo sapiens
tagtcaaaatggggagggactagggcagtttggatagctc

SEQ ID NO: 87139 - DNA, 40 bp, Homo sapiens
gagctatccaaactgccctagtccctccccattttgacta

SEQ ID NO: 87140 - DNA, 40 bp, Homo sapiens
agtcaaaatggggagggactagggcagtttggatagctca

SEQ ID NO: 87141 - DNA, 40 bp, Homo sapiens
tgagctatccaaactgccctagtccctccccattttgact

SEQ ID NO: 87142 - DNA, 40 bp, Homo sapiens
gtcaaaatggggagggactagggcagtttggatagctcaa

SEQ ID NO: 87143 - DNA, 40 bp, Homo sapiens
ttgagctatccaaactgccctagtccctccccattttgac

SEQ ID NO: 87144 - DNA, 40 bp, Homo sapiens
tcaaaatggggagggactagggcagtttggatagctcaac

SEQ ID NO: 87145 - DNA, 40 bp, Homo sapiens
gttgagctatccaaactgccctagtccctccccattttga

SEQ ID NO: 87146 - DNA, 40 bp, Homo sapiens
caaaatggggagggactagggcagtttggatagctcaaca

SEQ ID NO: 87147 - DNA, 40 bp, Homo sapiens
tgttgagctatccaaactgccctagtccctccccattttg

SEQ ID NO: 87148 - DNA, 40 bp, Homo sapiens
aaaatggggagggactagggcagtttggatagctcaacaa

SEQ ID NO: 87149 - DNA, 40 bp, Homo sapiens
ttgttgagctatccaaactgccctagtccctccccatttt

SEQ ID NO: 87150 - DNA, 40 bp, Homo sapiens
aaatggggagggactagggcagtttggatagctcaacaag

SEQ ID NO: 87151 - DNA, 40 bp, Homo sapiens
cttgttgagctatccaaactgccctagtccctccccattt

SEQ ID NO: 87152 - DNA, 40 bp, Homo sapiens
aatggggagggactagggcagtttggatagctcaacaaga

SEQ ID NO: 87153 - DNA, 40 bp, Homo sapiens
tcttgttgagctatccaaactgccctagtccctccccatt

SEQ ID NO: 87154 - DNA, 40 bp, Homo sapiens
atggggagggactagggcagtttggatagctcaacaagat

SEQ ID NO: 87155 - DNA, 40 bp, Homo sapiens
atcttgttgagctatccaaactgccctagtccctccccat

SEQ ID NO: 87156 - DNA, 40 bp, Homo sapiens
tggggagggactagggcagtttggatagctcaacaagata

SEQ ID NO: 87157 - DNA, 40 bp, Homo sapiens
tatcttgttgagctatccaaactgccctagtccctcccca

SEQ ID NO: 87158 - DNA, 40 bp, Homo sapiens
ggggagggactagggcagtttggatagctcaacaagatac

SEQ ID NO: 87159 - DNA, 40 bp, Homo sapiens
gtatcttgttgagctatccaaactgccctagtccctcccc

SEQ ID NO: 87160 - DNA, 40 bp, Homo sapiens
gggagggactagggcagtttggatagctcaacaagataca

SEQ ID NO: 87161 - DNA, 40 bp, Homo sapiens
tgtatcttgttgagctatccaaactgccctagtccctccc

SEQ ID NO: 87162 - DNA, 40 bp, Homo sapiens
ggagggactagggcagtttggatagctcaacaagatacaa

SEQ ID NO: 87163 - DNA, 40 bp, Homo sapiens
ttgtatcttgttgagctatccaaactgccctagtccctcc

SEQ ID NO: 87164 - DNA, 40 bp, Homo sapiens
gagggactagggcagtttggatagctcaacaagatacaat

SEQ ID NO: 87165 - DNA, 40 bp, Homo sapiens
attgtatcttgttgagctatccaaactgccctagtccctc

SEQ ID NO: 87166 - DNA, 40 bp, Homo sapiens
agggactagggcagtttggatagctcaacaagatacaatc

SEQ ID NO: 87167 - DNA, 40 bp, Homo sapiens
gattgtatcttgttgagctatccaaactgccctagtccct

SEQ ID NO: 87168 - DNA, 40 bp, Homo sapiens
gggactagggcagtttggatagctcaacaagatacaatct

SEQ ID NO: 87169 - DNA, 40 bp, Homo sapiens
agattgtatcttgttgagctatccaaactgccctagtccc

SEQ ID NO: 87170 - DNA, 40 bp, Homo sapiens
ggactagggcagtttggatagctcaacaagatacaatctc

SEQ ID NO: 87171 - DNA, 40 bp, Homo sapiens
gagattgtatcttgttgagctatccaaactgccctagtcc

SEQ ID NO: 87172 - DNA, 40 bp, Homo sapiens
gactagggcagtttggatagctcaacaagatacaatctca

SEQ ID NO: 87173 - DNA, 40 bp, Homo sapiens
tgagattgtatcttgttgagctatccaaactgccctagtc

SEQ ID NO: 87174 - DNA, 40 bp, Homo sapiens
actagggcagtttggatagctcaacaagatacaatctcac

SEQ ID NO: 87175 - DNA, 40 bp, Homo sapiens
gtgagattgtatcttgttgagctatccaaactgccctagt

SEQ ID NO: 87176 - DNA, 40 bp, Homo sapiens
ctagggcagtttggatagctcaacaagatacaatctcact

SEQ ID NO: 87177 - DNA, 40 bp, Homo sapiens
agtgagattgtatcttgttgagctatccaaactgccctag

SEQ ID NO: 87178 - DNA, 40 bp, Homo sapiens
tagggcagtttggatagctcaacaagatacaatctcactc

SEQ ID NO: 87179 - DNA, 40 bp, Homo sapiens
gagtgagattgtatcttgttgagctatccaaactgcccta

SEQ ID NO: 87180 - DNA, 40 bp, Homo sapiens
agggcagtttggatagctcaacaagatacaatctcactct

SEQ ID NO: 87181 - DNA, 40 bp, Homo sapiens
agagtgagattgtatcttgttgagctatccaaactgccct

SEQ ID NO: 87182 - DNA, 40 bp, Homo sapiens
gggcagtttggatagctcaacaagatacaatctcactctg

SEQ ID NO: 87183 - DNA, 40 bp, Homo sapiens
cagagtgagattgtatcttgttgagctatccaaactgccc

SEQ ID NO: 87184 - DNA, 40 bp, Homo sapiens
ggcagtttggatagctcaacaagatacaatctcactctgt

SEQ ID NO: 87185 - DNA, 40 bp, Homo sapiens
acagagtgagattgtatcttgttgagctatccaaactgcc

SEQ ID NO: 87186 - DNA, 40 bp, Homo sapiens
gcagtttggatagctcaacaagatacaatctcactctgtg

SEQ ID NO: 87187 - DNA, 40 bp, Homo sapiens
cacagagtgagattgtatcttgttgagctatccaaactgc

SEQ ID NO: 87188 - DNA, 40 bp, Homo sapiens
cagtttggatagctcaacaagatacaatctcactctgtgg

SEQ ID NO: 87189 - DNA, 40 bp, Homo sapiens
ccacagagtgagattgtatcttgttgagctatccaaactg

SEQ ID NO: 87190 - DNA, 40 bp, Homo sapiens
agtttggatagctcaacaagatacaatctcactctgtggt

SEQ ID NO: 87191 - DNA, 40 bp, Homo sapiens
accacagagtgagattgtatcttgttgagctatccaaact

SEQ ID NO: 87192 - DNA, 40 bp, Homo sapiens
gtttggatagctcaacaagatacaatctcactctgtggtg

SEQ ID NO: 87193 - DNA, 40 bp, Homo sapiens
caccacagagtgagattgtatcttgttgagctatccaaac

SEQ ID NO: 87194 - DNA, 40 bp, Homo sapiens
tttggatagctcaacaagatacaatctcactctgtggtgg

SEQ ID NO: 87195 - DNA, 40 bp, Homo sapiens
ccaccacagagtgagattgtatcttgttgagctatccaaa

SEQ ID NO: 87196 - DNA, 40 bp, Homo sapiens
ttggatagctcaacaagatacaatctcactctgtggtggt

SEQ ID NO: 87197 - DNA, 40 bp, Homo sapiens
accaccacagagtgagattgtatcttgttgagctatccaa

SEQ ID NO: 87198 - DNA, 40 bp, Homo sapiens
tggatagctcaacaagatacaatctcactctgtggtggtc

SEQ ID NO: 87199 - DNA, 40 bp, Homo sapiens
gaccaccacagagtgagattgtatcttgttgagctatcca

SEQ ID NO: 87200 - DNA, 40 bp, Homo sapiens
ggatagctcaacaagatacaatctcactctgtggtggtcc

SEQ ID NO: 87201 - DNA, 40 bp, Homo sapiens
ggaccaccacagagtgagattgtatcttgttgagctatcc

SEQ ID NO: 87202 - DNA, 40 bp, Homo sapiens
gatagctcaacaagatacaatctcactctgtggtggtcct

SEQ ID NO: 87203 - DNA, 40 bp, Homo sapiens
aggaccaccacagagtgagattgtatcttgttgagctatc

SEQ ID NO: 87204 - DNA, 40 bp, Homo sapiens
atagctcaacaagatacaatctcactctgtggtggtcctg

SEQ ID NO: 87205 - DNA, 40 bp, Homo sapiens
caggaccaccacagagtgagattgtatcttgttgagctat

SEQ ID NO: 87206 - DNA, 40 bp, Homo sapiens
tagctcaacaagatacaatctcactctgtggtggtcctgc

SEQ ID NO: 87207 - DNA, 40 bp, Homo sapiens
gcaggaccaccacagagtgagattgtatcttgttgagcta

SEQ ID NO: 87208 - DNA, 40 bp, Homo sapiens
agctcaacaagatacaatctcactctgtggtggtcctgct

SEQ ID NO: 87209 - DNA, 40 bp, Homo sapiens
agcaggaccaccacagagtgagattgtatcttgttgagct

SEQ ID NO: 87210 - DNA, 40 bp, Homo sapiens
gctcaacaagatacaatctcactctgtggtggtcctgctg

SEQ ID NO: 87211 - DNA, 40 bp, Homo sapiens
cagcaggaccaccacagagtgagattgtatcttgttgagc

SEQ ID NO: 87212 - DNA, 40 bp, Homo sapiens
ctcaacaagatacaatctcactctgtggtggtcctgctga

SEQ ID NO: 87213 - DNA, 40 bp, Homo sapiens
tcagcaggaccaccacagagtgagattgtatcttgttgag

SEQ ID NO: 87214 - DNA, 40 bp, Homo sapiens
tcaacaagatacaatctcactctgtggtggtcctgctgac

SEQ ID NO: 87215 - DNA, 40 bp, Homo sapiens
gtcagcaggaccaccacagagtgagattgtatcttgttga

SEQ ID NO: 87216 - DNA, 40 bp, Homo sapiens
caacaagatacaatctcactctgtggtggtcctgctgaca

SEQ ID NO: 87217 - DNA, 40 bp, Homo sapiens
tgtcagcaggaccaccacagagtgagattgtatcttgttg

SEQ ID NO: 87218 - DNA, 40 bp, Homo sapiens
aacaagatacaatctcactctgtggtggtcctgctgacaa

SEQ ID NO: 87219 - DNA, 40 bp, Homo sapiens
ttgtcagcaggaccaccacagagtgagattgtatcttgtt

SEQ ID NO: 87220 - DNA, 40 bp, Homo sapiens
acaagatacaatctcactctgtggtggtcctgctgacaaa

SEQ ID NO: 87221 - DNA, 40 bp, Homo sapiens
tttgtcagcaggaccaccacagagtgagattgtatcttgt

SEQ ID NO: 87222 - DNA, 40 bp, Homo sapiens
caagatacaatctcactctgtggtggtcctgctgacaaat

SEQ ID NO: 87223 - DNA, 40 bp, Homo sapiens
atttgtcagcaggaccaccacagagtgagattgtatcttg

SEQ ID NO: 87224 - DNA, 40 bp, Homo sapiens
aagatacaatctcactctgtggtggtcctgctgacaaatc

SEQ ID NO: 87225 - DNA, 40 bp, Homo sapiens
gatttgtcagcaggaccaccacagagtgagattgtatctt

SEQ ID NO: 87226 - DNA, 40 bp, Homo sapiens
agatacaatctcactctgtggtggtcctgctgacaaatca

SEQ ID NO: 87227 - DNA, 40 bp, Homo sapiens
tgatttgtcagcaggaccaccacagagtgagattgtatct

SEQ ID NO: 87228 - DNA, 40 bp, Homo sapiens
gatacaatctcactctgtggtggtcctgctgacaaatcaa

SEQ ID NO: 87229 - DNA, 40 bp, Homo sapiens
ttgatttgtcagcaggaccaccacagagtgagattgtatc

SEQ ID NO: 87230 - DNA, 40 bp, Homo sapiens
atacaatctcactctgtggtggtcctgctgacaaatcaag

SEQ ID NO: 87231 - DNA, 40 bp, Homo sapiens
cttgatttgtcagcaggaccaccacagagtgagattgtat

SEQ ID NO: 87232 - DNA, 40 bp, Homo sapiens
tacaatctcactctgtggtggtcctgctgacaaatcaaga

SEQ ID NO: 87233 - DNA, 40 bp, Homo sapiens
tcttgatttgtcagcaggaccaccacagagtgagattgta

SEQ ID NO: 87234 - DNA, 40 bp, Homo sapiens
acaatctcactctgtggtggtcctgctgacaaatcaagag

SEQ ID NO: 87235 - DNA, 40 bp, Homo sapiens
ctcttgatttgtcagcaggaccaccacagagtgagattgt

SEQ ID NO: 87236 - DNA, 40 bp, Homo sapiens
caatctcactctgtggtggtcctgctgacaaatcaagagc

SEQ ID NO: 87237 - DNA, 40 bp, Homo sapiens
gctcttgatttgtcagcaggaccaccacagagtgagattg

SEQ ID NO: 87238 - DNA, 40 bp, Homo sapiens
aatctcactctgtggtggtcctgctgacaaatcaagagca

SEQ ID NO: 87239 - DNA, 40 bp, Homo sapiens
tgctcttgatttgtcagcaggaccaccacagagtgagatt

SEQ ID NO: 87240 - DNA, 40 bp, Homo sapiens
atctcactctgtggtggtcctgctgacaaatcaagagcat

SEQ ID NO: 87241 - DNA, 40 bp, Homo sapiens
atgctcttgatttgtcagcaggaccaccacagagtgagat

SEQ ID NO: 87242 - DNA, 40 bp, Homo sapiens
tctcactctgtggtggtcctgctgacaaatcaagagcatt

SEQ ID NO: 87243 - DNA, 40 bp, Homo sapiens
aatgctcttgatttgtcagcaggaccaccacagagtgaga

SEQ ID NO: 87244 - DNA, 40 bp, Homo sapiens
ctcactctgtggtggtcctgctgacaaatcaagagcattg

SEQ ID NO: 87245 - DNA, 40 bp, Homo sapiens
caatgctcttgatttgtcagcaggaccaccacagagtgag

SEQ ID NO: 87246 - DNA, 40 bp, Homo sapiens
tcactctgtggtggtcctgctgacaaatcaagagcattgc

SEQ ID NO: 87247 - DNA, 40 bp, Homo sapiens
gcaatgctcttgatttgtcagcaggaccaccacagagtga

SEQ ID NO: 87248 - DNA, 40 bp, Homo sapiens
cactctgtggtggtcctgctgacaaatcaagagcattgct

SEQ ID NO: 87249 - DNA, 40 bp, Homo sapiens
agcaatgctcttgatttgtcagcaggaccaccacagagtg

SEQ ID NO: 87250 - DNA, 40 bp, Homo sapiens
actctgtggtggtcctgctgacaaatcaagagcattgctt

SEQ ID NO: 87251 - DNA, 40 bp, Homo sapiens
aagcaatgctcttgatttgtcagcaggaccaccacagagt

SEQ ID NO: 87252 - DNA, 40 bp, Homo sapiens
ctctgtggtggtcctgctgacaaatcaagagcattgcttt

SEQ ID NO: 87253 - DNA, 40 bp, Homo sapiens
aaagcaatgctcttgatttgtcagcaggaccaccacagag

SEQ ID NO: 87254 - DNA, 40 bp, Homo sapiens
tctgtggtggtcctgctgacaaatcaagagcattgctttt

SEQ ID NO: 87255 - DNA, 40 bp, Homo sapiens
aaaagcaatgctcttgatttgtcagcaggaccaccacaga

SEQ ID NO: 87256 - DNA, 40 bp, Homo sapiens
ctgtggtggtcctgctgacaaatcaagagcattgcttttg

SEQ ID NO: 87257 - DNA, 40 bp, Homo sapiens
caaaagcaatgctcttgatttgtcagcaggaccaccacag

SEQ ID NO: 87258 - DNA, 40 bp, Homo sapiens
tgtggtggtcctgctgacaaatcaagagcattgcttttgt

SEQ ID NO: 87259 - DNA, 40 bp, Homo sapiens
acaaaagcaatgctcttgatttgtcagcaggaccaccaca

SEQ ID NO: 87260 - DNA, 40 bp, Homo sapiens
gtggtggtcctgctgacaaatcaagagcattgcttttgtt

SEQ ID NO: 87261 - DNA, 40 bp, Homo sapiens
aacaaaagcaatgctcttgatttgtcagcaggaccaccac

SEQ ID NO: 87262 - DNA, 40 bp, Homo sapiens
tggtggtcctgctgacaaatcaagagcattgcttttgttt

SEQ ID NO: 87263 - DNA, 40 bp, Homo sapiens
aaacaaaagcaatgctcttgatttgtcagcaggaccacca

SEQ ID NO: 87264 - DNA, 40 bp, Homo sapiens
ggtggtcctgctgacaaatcaagagcattgcttttgtttc

SEQ ID NO: 87265 - DNA, 40 bp, Homo sapiens
gaaacaaaagcaatgctcttgatttgtcagcaggaccacc

SEQ ID NO: 87266 - DNA, 40 bp, Homo sapiens
gtggtcctgctgacaaatcaagagcattgcttttgtttct

SEQ ID NO: 87267 - DNA, 40 bp, Homo sapiens
agaaacaaaagcaatgctcttgatttgtcagcaggaccac

SEQ ID NO: 87268 - DNA, 40 bp, Homo sapiens
tggtcctgctgacaaatcaagagcattgcttttgtttctt

SEQ ID NO: 87269 - DNA, 40 bp, Homo sapiens
aagaaacaaaagcaatgctcttgatttgtcagcaggacca

SEQ ID NO: 87270 - DNA, 40 bp, Homo sapiens
ggtcctgctgacaaatcaagagcattgcttttgtttctta

SEQ ID NO: 87271 - DNA, 40 bp, Homo sapiens
taagaaacaaaagcaatgctcttgatttgtcagcaggacc

SEQ ID NO: 87272 - DNA, 40 bp, Homo sapiens
gtcctgctgacaaatcaagagcattgcttttgtttcttaa

SEQ ID NO: 87273 - DNA, 40 bp, Homo sapiens
ttaagaaacaaaagcaatgctcttgatttgtcagcaggac

SEQ ID NO: 87274 - DNA, 40 bp, Homo sapiens
tcctgctgacaaatcaagagcattgcttttgtttcttaag

SEQ ID NO: 87275 - DNA, 40 bp, Homo sapiens
cttaagaaacaaaagcaatgctcttgatttgtcagcagga

SEQ ID NO: 87276 - DNA, 40 bp, Homo sapiens
cctgctgacaaatcaagagcattgcttttgtttcttaaga

SEQ ID NO: 87277 - DNA, 40 bp, Homo sapiens
tcttaagaaacaaaagcaatgctcttgatttgtcagcagg

SEQ ID NO: 87278 - DNA, 40 bp, Homo sapiens
ctgctgacaaatcaagagcattgcttttgtttcttaagaa

SEQ ID NO: 87279 - DNA, 40 bp, Homo sapiens
ttcttaagaaacaaaagcaatgctcttgatttgtcagcag

SEQ ID NO: 87280 - DNA, 40 bp, Homo sapiens
tgctgacaaatcaagagcattgcttttgtttcttaagaaa

SEQ ID NO: 87281 - DNA, 40 bp, Homo sapiens
tttcttaagaaacaaaagcaatgctcttgatttgtcagca

SEQ ID NO: 87282 - DNA, 40 bp, Homo sapiens
gctgacaaatcaagagcattgcttttgtttcttaagaaaa

SEQ ID NO: 87283 - DNA, 40 bp, Homo sapiens
ttttcttaagaaacaaaagcaatgctcttgatttgtcagc

SEQ ID NO: 87284 - DNA, 40 bp, Homo sapiens
ctgacaaatcaagagcattgcttttgtttcttaagaaaac

SEQ ID NO: 87285 - DNA, 40 bp, Homo sapiens
gttttcttaagaaacaaaagcaatgctcttgatttgtcag

SEQ ID NO: 87286 - DNA, 40 bp, Homo sapiens
tgacaaatcaagagcattgcttttgtttcttaagaaaaca

SEQ ID NO: 87287 - DNA, 40 bp, Homo sapiens
tgttttcttaagaaacaaaagcaatgctcttgatttgtca

SEQ ID NO: 87288 - DNA, 40 bp, Homo sapiens
gacaaatcaagagcattgcttttgtttcttaagaaaacaa

SEQ ID NO: 87289 - DNA, 40 bp, Homo sapiens
ttgttttcttaagaaacaaaagcaatgctcttgatttgtc

SEQ ID NO: 87290 - DNA, 40 bp, Homo sapiens
acaaatcaagagcattgcttttgtttcttaagaaaacaaa

SEQ ID NO: 87291 - DNA, 40 bp, Homo sapiens
tttgttttcttaagaaacaaaagcaatgctcttgatttgt

SEQ ID NO: 87292 - DNA, 40 bp, Homo sapiens
caaatcaagagcattgcttttgtttcttaagaaaacaaac

SEQ ID NO: 87293 - DNA, 40 bp, Homo sapiens
gtttgttttcttaagaaacaaaagcaatgctcttgatttg

SEQ ID NO: 87294 - DNA, 40 bp, Homo sapiens
aaatcaagagcattgcttttgtttcttaagaaaacaaact

SEQ ID NO: 87295 - DNA, 40 bp, Homo sapiens
agtttgttttcttaagaaacaaaagcaatgctcttgattt

SEQ ID NO: 87296 - DNA, 40 bp, Homo sapiens
aatcaagagcattgcttttgtttcttaagaaaacaaactc

SEQ ID NO: 87297 - DNA, 40 bp, Homo sapiens
gagtttgttttcttaagaaacaaaagcaatgctcttgatt

SEQ ID NO: 87298 - DNA, 40 bp, Homo sapiens
atcaagagcattgcttttgtttcttaagaaaacaaactct

SEQ ID NO: 87299 - DNA, 40 bp, Homo sapiens
agagtttgttttcttaagaaacaaaagcaatgctcttgat

SEQ ID NO: 87300 - DNA, 40 bp, Homo sapiens
tcaagagcattgcttttgtttcttaagaaaacaaactctt

SEQ ID NO: 87301 - DNA, 40 bp, Homo sapiens
aagagtttgttttcttaagaaacaaaagcaatgctcttga

SEQ ID NO: 87302 - DNA, 40 bp, Homo sapiens
caagagcattgcttttgtttcttaagaaaacaaactcttt

SEQ ID NO: 87303 - DNA, 40 bp, Homo sapiens
aaagagtttgttttcttaagaaacaaaagcaatgctcttg

SEQ ID NO: 87304 - DNA, 40 bp, Homo sapiens
aagagcattgcttttgtttcttaagaaaacaaactctttt

SEQ ID NO: 87305 - DNA, 40 bp, Homo sapiens
aaaagagtttgttttcttaagaaacaaaagcaatgctctt

SEQ ID NO: 87306 - DNA, 40 bp, Homo sapiens
agagcattgcttttgtttcttaagaaaacaaactcttttt

SEQ ID NO: 87307 - DNA, 40 bp, Homo sapiens
aaaaagagtttgttttcttaagaaacaaaagcaatgctct

SEQ ID NO: 87308 - DNA, 40 bp, Homo sapiens
gagcattgcttttgtttcttaagaaaacaaactctttttt

SEQ ID NO: 87309 - DNA, 40 bp, Homo sapiens
aaaaaagagtttgttttcttaagaaacaaaagcaatgctc

SEQ ID NO: 87310 - DNA, 40 bp, Homo sapiens
agcattgcttttgtttcttaagaaaacaaactctttttta

SEQ ID NO: 87311 - DNA, 40 bp, Homo sapiens
taaaaaagagtttgttttcttaagaaacaaaagcaatgct

SEQ ID NO: 87312 - DNA, 40 bp, Homo sapiens
gcattgcttttgtttcttaagaaaacaaactcttttttaa

SEQ ID NO: 87313 - DNA, 40 bp, Homo sapiens
ttaaaaaagagtttgttttcttaagaaacaaaagcaatgc

SEQ ID NO: 87314 - DNA, 40 bp, Homo sapiens
cattgcttttgtttcttaagaaaacaaactcttttttaaa

SEQ ID NO: 87315 - DNA, 40 bp, Homo sapiens
tttaaaaaagagtttgttttcttaagaaacaaaagcaatg

SEQ ID NO: 87316 - DNA, 40 bp, Homo sapiens
attgcttttgtttcttaagaaaacaaactcttttttaaaa

SEQ ID NO: 87317 - DNA, 40 bp, Homo sapiens
ttttaaaaaagagtttgttttcttaagaaacaaaagcaat

SEQ ID NO: 87318 - DNA, 40 bp, Homo sapiens
ttgcttttgtttcttaagaaaacaaactcttttttaaaaa

SEQ ID NO: 87319 - DNA, 40 bp, Homo sapiens
tttttaaaaaagagtttgttttcttaagaaacaaaagcaa

SEQ ID NO: 87320 - DNA, 40 bp, Homo sapiens
tgcttttgtttcttaagaaaacaaactcttttttaaaaat

SEQ ID NO: 87321 - DNA, 40 bp, Homo sapiens
atttttaaaaaagagtttgttttcttaagaaacaaaagca

SEQ ID NO: 87322 - DNA, 40 bp, Homo sapiens
gcttttgtttcttaagaaaacaaactcttttttaaaaatt

SEQ ID NO: 87323 - DNA, 40 bp, Homo sapiens
aatttttaaaaaagagtttgttttcttaagaaacaaaagc

SEQ ID NO: 87324 - DNA, 40 bp, Homo sapiens
cttttgtttcttaagaaaacaaactcttttttaaaaatta

SEQ ID NO: 87325 - DNA, 40 bp, Homo sapiens
taatttttaaaaaagagtttgttttcttaagaaacaaaag

SEQ ID NO: 87326 - DNA, 40 bp, Homo sapiens
ttttgtttcttaagaaaacaaactcttttttaaaaattac

SEQ ID NO: 87327 - DNA, 40 bp, Homo sapiens
gtaatttttaaaaaagagtttgttttcttaagaaacaaaa

SEQ ID NO: 87328 - DNA, 40 bp, Homo sapiens
tttgtttcttaagaaaacaaactcttttttaaaaattact

SEQ ID NO: 87329 - DNA, 40 bp, Homo sapiens
agtaatttttaaaaaagagtttgttttcttaagaaacaaa

SEQ ID NO: 87330 - DNA, 40 bp, Homo sapiens
ttgtttcttaagaaaacaaactcttttttaaaaattactt

SEQ ID NO: 87331 - DNA, 40 bp, Homo sapiens
aagtaatttttaaaaaagagtttgttttcttaagaaacaa

SEQ ID NO: 87332 - DNA, 40 bp, Homo sapiens
tgtttcttaagaaaacaaactcttttttaaaaattacttt

SEQ ID NO: 87333 - DNA, 40 bp, Homo sapiens
aaagtaatttttaaaaaagagtttgttttcttaagaaaca

SEQ ID NO: 87334 - DNA, 40 bp, Homo sapiens
gtttcttaagaaaacaaactcttttttaaaaattactttt

SEQ ID NO: 87335 - DNA, 40 bp, Homo sapiens
aaaagtaatttttaaaaaagagtttgttttcttaagaaac

SEQ ID NO: 87336 - DNA, 40 bp, Homo sapiens
tttcttaagaaaacaaactcttttttaaaaattactttta

SEQ ID NO: 87337 - DNA, 40 bp, Homo sapiens
taaaagtaatttttaaaaaagagtttgttttcttaagaaa

SEQ ID NO: 87338 - DNA, 40 bp, Homo sapiens
ttcttaagaaaacaaactcttttttaaaaattacttttaa

SEQ ID NO: 87339 - DNA, 40 bp, Homo sapiens
ttaaaagtaatttttaaaaaagagtttgttttcttaagaa

SEQ ID NO: 87340 - DNA, 40 bp, Homo sapiens
tcttaagaaaacaaactcttttttaaaaattacttttaaa

SEQ ID NO: 87341 - DNA, 40 bp, Homo sapiens
tttaaaagtaatttttaaaaaagagtttgttttcttaaga

SEQ ID NO: 87342 - DNA, 40 bp, Homo sapiens
cttaagaaaacaaactcttttttaaaaattacttttaaat

SEQ ID NO: 87343 - DNA, 40 bp, Homo sapiens
atttaaaagtaatttttaaaaaagagtttgttttcttaag

SEQ ID NO: 87344 - DNA, 40 bp, Homo sapiens
ttaagaaaacaaactcttttttaaaaattacttttaaata

SEQ ID NO: 87345 - DNA, 40 bp, Homo sapiens
tatttaaaagtaatttttaaaaaagagtttgttttcttaa

SEQ ID NO: 87346 - DNA, 40 bp, Homo sapiens
taagaaaacaaactcttttttaaaaattacttttaaatat

SEQ ID NO: 87347 - DNA, 40 bp, Homo sapiens
atatttaaaagtaatttttaaaaaagagtttgttttctta

SEQ ID NO: 87348 - DNA, 40 bp, Homo sapiens
aagaaaacaaactcttttttaaaaattacttttaaatatt

SEQ ID NO: 87349 - DNA, 40 bp, Homo sapiens
aatatttaaaagtaatttttaaaaaagagtttgttttctt

SEQ ID NO: 87350 - DNA, 40 bp, Homo sapiens
agaaaacaaactcttttttaaaaattacttttaaatatta

SEQ ID NO: 87351 - DNA, 40 bp, Homo sapiens
taatatttaaaagtaatttttaaaaaagagtttgttttct

SEQ ID NO: 87352 - DNA, 40 bp, Homo sapiens
gaaaacaaactcttttttaaaaattacttttaaatattaa

SEQ ID NO: 87353 - DNA, 40 bp, Homo sapiens
ttaatatttaaaagtaatttttaaaaaagagtttgttttc

SEQ ID NO: 87354 - DNA, 40 bp, Homo sapiens
aaaacaaactcttttttaaaaattacttttaaatattaac

SEQ ID NO: 87355 - DNA, 40 bp, Homo sapiens
gttaatatttaaaagtaatttttaaaaaagagtttgtttt

SEQ ID NO: 87356 - DNA, 40 bp, Homo sapiens
aaacaaactcttttttaaaaattacttttaaatattaact

SEQ ID NO: 87357 - DNA, 40 bp, Homo sapiens
agttaatatttaaaagtaatttttaaaaaagagtttgttt

SEQ ID NO: 87358 - DNA, 40 bp, Homo sapiens
aacaaactcttttttaaaaattacttttaaatattaactc

SEQ ID NO: 87359 - DNA, 40 bp, Homo sapiens
gagttaatatttaaaagtaatttttaaaaaagagtttgtt

SEQ ID NO: 87360 - DNA, 40 bp, Homo sapiens
acaaactcttttttaaaaattacttttaaatattaactca

SEQ ID NO: 87361 - DNA, 40 bp, Homo sapiens
tgagttaatatttaaaagtaatttttaaaaaagagtttgt

SEQ ID NO: 87362 - DNA, 40 bp, Homo sapiens
caaactcttttttaaaaattacttttaaatattaactcaa

SEQ ID NO: 87363 - DNA, 40 bp, Homo sapiens
ttgagttaatatttaaaagtaatttttaaaaaagagtttg

SEQ ID NO: 87364 - DNA, 40 bp, Homo sapiens
aaactcttttttaaaaattacttttaaatattaactcaaa

SEQ ID NO: 87365 - DNA, 40 bp, Homo sapiens
tttgagttaatatttaaaagtaatttttaaaaaagagttt

SEQ ID NO: 87366 - DNA, 40 bp, Homo sapiens
aactcttttttaaaaattacttttaaatattaactcaaaa

SEQ ID NO: 87367 - DNA, 40 bp, Homo sapiens
ttttgagttaatatttaaaagtaatttttaaaaaagagtt

SEQ ID NO: 87368 - DNA, 40 bp, Homo sapiens
actcttttttaaaaattacttttaaatattaactcaaaag

SEQ ID NO: 87369 - DNA, 40 bp, Homo sapiens
cttttgagttaatatttaaaagtaatttttaaaaaagagt

SEQ ID NO: 87370 - DNA, 40 bp, Homo sapiens
ctcttttttaaaaattacttttaaatattaactcaaaagt

SEQ ID NO: 87371 - DNA, 40 bp, Homo sapiens
acttttgagttaatatttaaaagtaatttttaaaaaagag

SEQ ID NO: 87372 - DNA, 40 bp, Homo sapiens
tcttttttaaaaattacttttaaatattaactcaaaagtt

SEQ ID NO: 87373 - DNA, 40 bp, Homo sapiens
aacttttgagttaatatttaaaagtaatttttaaaaaaga

SEQ ID NO: 87374 - DNA, 40 bp, Homo sapiens
cttttttaaaaattacttttaaatattaactcaaaagttg

SEQ ID NO: 87375 - DNA, 40 bp, Homo sapiens
caacttttgagttaatatttaaaagtaatttttaaaaaag

SEQ ID NO: 87376 - DNA, 40 bp, Homo sapiens
ttttttaaaaattacttttaaatattaactcaaaagttga

SEQ ID NO: 87377 - DNA, 40 bp, Homo sapiens
tcaacttttgagttaatatttaaaagtaatttttaaaaaa

SEQ ID NO: 87378 - DNA, 40 bp, Homo sapiens
tttttaaaaattacttttaaatattaactcaaaagttgag

SEQ ID NO: 87379 - DNA, 40 bp, Homo sapiens
ctcaacttttgagttaatatttaaaagtaatttttaaaaa

SEQ ID NO: 87380 - DNA, 40 bp, Homo sapiens
ttttaaaaattacttttaaatattaactcaaaagttgaga

SEQ ID NO: 87381 - DNA, 40 bp, Homo sapiens
tctcaacttttgagttaatatttaaaagtaatttttaaaa

SEQ ID NO: 87382 - DNA, 40 bp, Homo sapiens
tttaaaaattacttttaaatattaactcaaaagttgagat

SEQ ID NO: 87383 - DNA, 40 bp, Homo sapiens
atctcaacttttgagttaatatttaaaagtaatttttaaa

SEQ ID NO: 87384 - DNA, 40 bp, Homo sapiens
ttaaaaattacttttaaatattaactcaaaagttgagatt

SEQ ID NO: 87385 - DNA, 40 bp, Homo sapiens
aatctcaacttttgagttaatatttaaaagtaatttttaa

SEQ ID NO: 87386 - DNA, 40 bp, Homo sapiens
taaaaattacttttaaatattaactcaaaagttgagattt

SEQ ID NO: 87387 - DNA, 40 bp, Homo sapiens
aaatctcaacttttgagttaatatttaaaagtaattttta

SEQ ID NO: 87388 - DNA, 40 bp, Homo sapiens
aaaaattacttttaaatattaactcaaaagttgagatttt

SEQ ID NO: 87389 - DNA, 40 bp, Homo sapiens
aaaatctcaacttttgagttaatatttaaaagtaattttt

SEQ ID NO: 87390 - DNA, 40 bp, Homo sapiens
aaaattacttttaaatattaactcaaaagttgagattttg

SEQ ID NO: 87391 - DNA, 40 bp, Homo sapiens
caaaatctcaacttttgagttaatatttaaaagtaatttt

SEQ ID NO: 87392 - DNA, 40 bp, Homo sapiens
aaattacttttaaatattaactcaaaagttgagattttgg

SEQ ID NO: 87393 - DNA, 40 bp, Homo sapiens
ccaaaatctcaacttttgagttaatatttaaaagtaattt

SEQ ID NO: 87394 - DNA, 40 bp, Homo sapiens
aattacttttaaatattaactcaaaagttgagattttggg

SEQ ID NO: 87395 - DNA, 40 bp, Homo sapiens
cccaaaatctcaacttttgagttaatatttaaaagtaatt

SEQ ID NO: 87396 - DNA, 40 bp, Homo sapiens
attacttttaaatattaactcaaaagttgagattttgggg

SEQ ID NO: 87397 - DNA, 40 bp, Homo sapiens
ccccaaaatctcaacttttgagttaatatttaaaagtaat

SEQ ID NO: 87398 - DNA, 40 bp, Homo sapiens
ttacttttaaatattaactcaaaagttgagattttggggt

SEQ ID NO: 87399 - DNA, 40 bp, Homo sapiens
accccaaaatctcaacttttgagttaatatttaaaagtaa

SEQ ID NO: 87400 - DNA, 40 bp, Homo sapiens
tacttttaaatattaactcaaaagttgagattttggggtg

SEQ ID NO: 87401 - DNA, 40 bp, Homo sapiens
caccccaaaatctcaacttttgagttaatatttaaaagta

SEQ ID NO: 87402 - DNA, 40 bp, Homo sapiens
acttttaaatattaactcaaaagttgagattttggggtgg

SEQ ID NO: 87403 - DNA, 40 bp, Homo sapiens
ccaccccaaaatctcaacttttgagttaatatttaaaagt

SEQ ID NO: 87404 - DNA, 40 bp, Homo sapiens
cttttaaatattaactcaaaagttgagattttggggtggt

SEQ ID NO: 87405 - DNA, 40 bp, Homo sapiens
accaccccaaaatctcaacttttgagttaatatttaaaag

SEQ ID NO: 87406 - DNA, 40 bp, Homo sapiens
ttttaaatattaactcaaaagttgagattttggggtggtg

SEQ ID NO: 87407 - DNA, 40 bp, Homo sapiens
caccaccccaaaatctcaacttttgagttaatatttaaaa

SEQ ID NO: 87408 - DNA, 40 bp, Homo sapiens
tttaaatattaactcaaaagttgagattttggggtggtgg

SEQ ID NO: 87409 - DNA, 40 bp, Homo sapiens
ccaccaccccaaaatctcaacttttgagttaatatttaaa

SEQ ID NO: 87410 - DNA, 40 bp, Homo sapiens
ttaaatattaactcaaaagttgagattttggggtggtggt

SEQ ID NO: 87411 - DNA, 40 bp, Homo sapiens
accaccaccccaaaatctcaacttttgagttaatatttaa

SEQ ID NO: 87412 - DNA, 40 bp, Homo sapiens
taaatattaactcaaaagttgagattttggggtggtggtg

SEQ ID NO: 87413 - DNA, 40 bp, Homo sapiens
caccaccaccccaaaatctcaacttttgagttaatattta

SEQ ID NO: 87414 - DNA, 40 bp, Homo sapiens
aaatattaactcaaaagttgagattttggggtggtggtgt

SEQ ID NO: 87415 - DNA, 40 bp, Homo sapiens
acaccaccaccccaaaatctcaacttttgagttaatattt

SEQ ID NO: 87416 - DNA, 40 bp, Homo sapiens
aatattaactcaaaagttgagattttggggtggtggtgtg

SEQ ID NO: 87417 - DNA, 40 bp, Homo sapiens
cacaccaccaccccaaaatctcaacttttgagttaatatt

SEQ ID NO: 87418 - DNA, 40 bp, Homo sapiens
atattaactcaaaagttgagattttggggtggtggtgtgc

SEQ ID NO: 87419 - DNA, 40 bp, Homo sapiens
gcacaccaccaccccaaaatctcaacttttgagttaatat

SEQ ID NO: 87420 - DNA, 40 bp, Homo sapiens
tattaactcaaaagttgagattttggggtggtggtgtgcc

SEQ ID NO: 87421 - DNA, 40 bp, Homo sapiens
ggcacaccaccaccccaaaatctcaacttttgagttaata

SEQ ID NO: 87422 - DNA, 40 bp, Homo sapiens
attaactcaaaagttgagattttggggtggtggtgtgcca

SEQ ID NO: 87423 - DNA, 40 bp, Homo sapiens
tggcacaccaccaccccaaaatctcaacttttgagttaat

SEQ ID NO: 87424 - DNA, 40 bp, Homo sapiens
ttaactcaaaagttgagattttggggtggtggtgtgccaa

SEQ ID NO: 87425 - DNA, 40 bp, Homo sapiens
ttggcacaccaccaccccaaaatctcaacttttgagttaa

SEQ ID NO: 87426 - DNA, 40 bp, Homo sapiens
taactcaaaagttgagattttggggtggtggtgtgccaag

SEQ ID NO: 87427 - DNA, 40 bp, Homo sapiens
cttggcacaccaccaccccaaaatctcaacttttgagtta

SEQ ID NO: 87428 - DNA, 40 bp, Homo sapiens
aactcaaaagttgagattttggggtggtggtgtgccaaga

SEQ ID NO: 87429 - DNA, 40 bp, Homo sapiens
tcttggcacaccaccaccccaaaatctcaacttttgagtt

SEQ ID NO: 87430 - DNA, 40 bp, Homo sapiens
actcaaaagttgagattttggggtggtggtgtgccaagac

SEQ ID NO: 87431 - DNA, 40 bp, Homo sapiens
gtcttggcacaccaccaccccaaaatctcaacttttgagt

SEQ ID NO: 87432 - DNA, 40 bp, Homo sapiens
ctcaaaagttgagattttggggtggtggtgtgccaagaca

SEQ ID NO: 87433 - DNA, 40 bp, Homo sapiens
tgtcttggcacaccaccaccccaaaatctcaacttttgag

SEQ ID NO: 87434 - DNA, 40 bp, Homo sapiens
tcaaaagttgagattttggggtggtggtgtgccaagacat

SEQ ID NO: 87435 - DNA, 40 bp, Homo sapiens
atgtcttggcacaccaccaccccaaaatctcaacttttga

SEQ ID NO: 87436 - DNA, 40 bp, Homo sapiens
caaaagttgagattttggggtggtggtgtgccaagacatt

SEQ ID NO: 87437 - DNA, 40 bp, Homo sapiens
aatgtcttggcacaccaccaccccaaaatctcaacttttg

SEQ ID NO: 87438 - DNA, 40 bp, Homo sapiens
aaaagttgagattttggggtggtggtgtgccaagacatta

SEQ ID NO: 87439 - DNA, 40 bp, Homo sapiens
taatgtcttggcacaccaccaccccaaaatctcaactttt

SEQ ID NO: 87440 - DNA, 40 bp, Homo sapiens
aaagttgagattttggggtggtggtgtgccaagacattaa

SEQ ID NO: 87441 - DNA, 40 bp, Homo sapiens
ttaatgtcttggcacaccaccaccccaaaatctcaacttt

SEQ ID NO: 87442 - DNA, 40 bp, Homo sapiens
aagttgagattttggggtggtggtgtgccaagacattaat

SEQ ID NO: 87443 - DNA, 40 bp, Homo sapiens
attaatgtcttggcacaccaccaccccaaaatctcaactt

SEQ ID NO: 87444 - DNA, 40 bp, Homo sapiens
agttgagattttggggtggtggtgtgccaagacattaatt

SEQ ID NO: 87445 - DNA, 40 bp, Homo sapiens
aattaatgtcttggcacaccaccaccccaaaatctcaact

SEQ ID NO: 87446 - DNA, 40 bp, Homo sapiens
gttgagattttggggtggtggtgtgccaagacattaattt

SEQ ID NO: 87447 - DNA, 40 bp, Homo sapiens
aaattaatgtcttggcacaccaccaccccaaaatctcaac

SEQ ID NO: 87448 - DNA, 40 bp, Homo sapiens
ttgagattttggggtggtggtgtgccaagacattaatttt

SEQ ID NO: 87449 - DNA, 40 bp, Homo sapiens
aaaattaatgtcttggcacaccaccaccccaaaatctcaa

SEQ ID NO: 87450 - DNA, 40 bp, Homo sapiens
tgagattttggggtggtggtgtgccaagacattaattttt

SEQ ID NO: 87451 - DNA, 40 bp, Homo sapiens
aaaaattaatgtcttggcacaccaccaccccaaaatctca

SEQ ID NO: 87452 - DNA, 40 bp, Homo sapiens
gagattttggggtggtggtgtgccaagacattaatttttt

SEQ ID NO: 87453 - DNA, 40 bp, Homo sapiens
aaaaaattaatgtcttggcacaccaccaccccaaaatctc

SEQ ID NO: 87454 - DNA, 40 bp, Homo sapiens
agattttggggtggtggtgtgccaagacattaattttttt

SEQ ID NO: 87455 - DNA, 40 bp, Homo sapiens
aaaaaaattaatgtcttggcacaccaccaccccaaaatct

SEQ ID NO: 87456 - DNA, 40 bp, Homo sapiens
gattttggggtggtggtgtgccaagacattaatttttttt

SEQ ID NO: 87457 - DNA, 40 bp, Homo sapiens
aaaaaaaattaatgtcttggcacaccaccaccccaaaatc

SEQ ID NO: 87458 - DNA, 40 bp, Homo sapiens
attttggggtggtggtgtgccaagacattaattttttttt

SEQ ID NO: 87459 - DNA, 40 bp, Homo sapiens
aaaaaaaaattaatgtcttggcacaccaccaccccaaaat

SEQ ID NO: 87460 - DNA, 40 bp, Homo sapiens
ttttggggtggtggtgtgccaagacattaatttttttttt

SEQ ID NO: 87461 - DNA, 40 bp, Homo sapiens
aaaaaaaaaattaatgtcttggcacaccaccaccccaaaa

SEQ ID NO: 87462 - DNA, 40 bp, Homo sapiens
tttggggtggtggtgtgccaagacattaatttttttttta

SEQ ID NO: 87463 - DNA, 40 bp, Homo sapiens
taaaaaaaaaattaatgtcttggcacaccaccaccccaaa

SEQ ID NO: 87464 - DNA, 40 bp, Homo sapiens
ttggggtggtggtgtgccaagacattaattttttttttaa

SEQ ID NO: 87465 - DNA, 40 bp, Homo sapiens
ttaaaaaaaaaattaatgtcttggcacaccaccaccccaa

SEQ ID NO: 87466 - DNA, 40 bp, Homo sapiens
tggggtggtggtgtgccaagacattaattttttttttaaa

SEQ ID NO: 87467 - DNA, 40 bp, Homo sapiens
tttaaaaaaaaaattaatgtcttggcacaccaccacccca

SEQ ID NO: 87468 - DNA, 40 bp, Homo sapiens
ggggtggtggtgtgccaagacattaattttttttttaaac

SEQ ID NO: 87469 - DNA, 40 bp, Homo sapiens
gtttaaaaaaaaaattaatgtcttggcacaccaccacccc

SEQ ID NO: 87470 - DNA, 40 bp, Homo sapiens
gggtggtggtgtgccaagacattaattttttttttaaaca

SEQ ID NO: 87471 - DNA, 40 bp, Homo sapiens
tgtttaaaaaaaaaattaatgtcttggcacaccaccaccc

SEQ ID NO: 87472 - DNA, 40 bp, Homo sapiens
ggtggtggtgtgccaagacattaattttttttttaaacaa

SEQ ID NO: 87473 - DNA, 40 bp, Homo sapiens
ttgtttaaaaaaaaaattaatgtcttggcacaccaccacc

SEQ ID NO: 87474 - DNA, 40 bp, Homo sapiens
gtggtggtgtgccaagacattaattttttttttaaacaat

SEQ ID NO: 87475 - DNA, 40 bp, Homo sapiens
attgtttaaaaaaaaaattaatgtcttggcacaccaccac

SEQ ID NO: 87476 - DNA, 40 bp, Homo sapiens
tggtggtgtgccaagacattaattttttttttaaacaatg

SEQ ID NO: 87477 - DNA, 40 bp, Homo sapiens
cattgtttaaaaaaaaaattaatgtcttggcacaccacca

SEQ ID NO: 87478 - DNA, 40 bp, Homo sapiens
ggtggtgtgccaagacattaattttttttttaaacaatga

SEQ ID NO: 87479 - DNA, 40 bp, Homo sapiens
tcattgtttaaaaaaaaaattaatgtcttggcacaccacc

SEQ ID NO: 87480 - DNA, 40 bp, Homo sapiens
gtggtgtgccaagacattaattttttttttaaacaatgaa

SEQ ID NO: 87481 - DNA, 40 bp, Homo sapiens
ttcattgtttaaaaaaaaaattaatgtcttggcacaccac

SEQ ID NO: 87482 - DNA, 40 bp, Homo sapiens
tggtgtgccaagacattaattttttttttaaacaatgaag

SEQ ID NO: 87483 - DNA, 40 bp, Homo sapiens
cttcattgtttaaaaaaaaaattaatgtcttggcacacca

SEQ ID NO: 87484 - DNA, 40 bp, Homo sapiens
ggtgtgccaagacattaattttttttttaaacaatgaagt

SEQ ID NO: 87485 - DNA, 40 bp, Homo sapiens
acttcattgtttaaaaaaaaaattaatgtcttggcacacc

SEQ ID NO: 87486 - DNA, 40 bp, Homo sapiens
gtgtgccaagacattaattttttttttaaacaatgaagtg

SEQ ID NO: 87487 - DNA, 40 bp, Homo sapiens
cacttcattgtttaaaaaaaaaattaatgtcttggcacac

SEQ ID NO: 87488 - DNA, 40 bp, Homo sapiens
tgtgccaagacattaattttttttttaaacaatgaagtga

SEQ ID NO: 87489 - DNA, 40 bp, Homo sapiens
tcacttcattgtttaaaaaaaaaattaatgtcttggcaca

SEQ ID NO: 87490 - DNA, 40 bp, Homo sapiens
gtgccaagacattaattttttttttaaacaatgaagtgaa

SEQ ID NO: 87491 - DNA, 40 bp, Homo sapiens
ttcacttcattgtttaaaaaaaaaattaatgtcttggcac

SEQ ID NO: 87492 - DNA, 40 bp, Homo sapiens
tgccaagacattaattttttttttaaacaatgaagtgaaa

SEQ ID NO: 87493 - DNA, 40 bp, Homo sapiens
tttcacttcattgtttaaaaaaaaaattaatgtcttggca

SEQ ID NO: 87494 - DNA, 40 bp, Homo sapiens
gccaagacattaattttttttttaaacaatgaagtgaaaa

SEQ ID NO: 87495 - DNA, 40 bp, Homo sapiens
ttttcacttcattgtttaaaaaaaaaattaatgtcttggc

SEQ ID NO: 87496 - DNA, 40 bp, Homo sapiens
ccaagacattaattttttttttaaacaatgaagtgaaaaa

SEQ ID NO: 87497 - DNA, 40 bp, Homo sapiens
tttttcacttcattgtttaaaaaaaaaattaatgtcttgg

SEQ ID NO: 87498 - DNA, 40 bp, Homo sapiens
caagacattaattttttttttaaacaatgaagtgaaaaag

SEQ ID NO: 87499 - DNA, 40 bp, Homo sapiens
ctttttcacttcattgtttaaaaaaaaaattaatgtcttg

SEQ ID NO: 87500 - DNA, 40 bp, Homo sapiens
aagacattaattttttttttaaacaatgaagtgaaaaagt

SEQ ID NO: 87501 - DNA, 40 bp, Homo sapiens
actttttcacttcattgtttaaaaaaaaaattaatgtctt

SEQ ID NO: 87502 - DNA, 40 bp, Homo sapiens
agacattaattttttttttaaacaatgaagtgaaaaagtt

SEQ ID NO: 87503 - DNA, 40 bp, Homo sapiens
aactttttcacttcattgtttaaaaaaaaaattaatgtct

SEQ ID NO: 87504 - DNA, 40 bp, Homo sapiens
gacattaattttttttttaaacaatgaagtgaaaaagttt

SEQ ID NO: 87505 - DNA, 40 bp, Homo sapiens
aaactttttcacttcattgtttaaaaaaaaaattaatgtc

SEQ ID NO: 87506 - DNA, 40 bp, Homo sapiens
acattaattttttttttaaacaatgaagtgaaaaagtttt

SEQ ID NO: 87507 - DNA, 40 bp, Homo sapiens
aaaactttttcacttcattgtttaaaaaaaaaattaatgt

SEQ ID NO: 87508 - DNA, 40 bp, Homo sapiens
cattaattttttttttaaacaatgaagtgaaaaagtttta

SEQ ID NO: 87509 - DNA, 40 bp, Homo sapiens
taaaactttttcacttcattgtttaaaaaaaaaattaatg

SEQ ID NO: 87510 - DNA, 40 bp, Homo sapiens
attaattttttttttaaacaatgaagtgaaaaagttttac

SEQ ID NO: 87511 - DNA, 40 bp, Homo sapiens
gtaaaactttttcacttcattgtttaaaaaaaaaattaat

SEQ ID NO: 87512 - DNA, 40 bp, Homo sapiens
ttaattttttttttaaacaatgaagtgaaaaagttttaca

SEQ ID NO: 87513 - DNA, 40 bp, Homo sapiens
tgtaaaactttttcacttcattgtttaaaaaaaaaattaa

SEQ ID NO: 87514 - DNA, 40 bp, Homo sapiens
taattttttttttaaacaatgaagtgaaaaagttttacaa

SEQ ID NO: 87515 - DNA, 40 bp, Homo sapiens
ttgtaaaactttttcacttcattgtttaaaaaaaaaatta

SEQ ID NO: 87516 - DNA, 40 bp, Homo sapiens
aattttttttttaaacaatgaagtgaaaaagttttacaat

SEQ ID NO: 87517 - DNA, 40 bp, Homo sapiens
attgtaaaactttttcacttcattgtttaaaaaaaaaatt

SEQ ID NO: 87518 - DNA, 40 bp, Homo sapiens
attttttttttaaacaatgaagtgaaaaagttttacaatc

SEQ ID NO: 87519 - DNA, 40 bp, Homo sapiens
gattgtaaaactttttcacttcattgtttaaaaaaaaaat

SEQ ID NO: 87520 - DNA, 40 bp, Homo sapiens
ttttttttttaaacaatgaagtgaaaaagttttacaatct

SEQ ID NO: 87521 - DNA, 40 bp, Homo sapiens
agattgtaaaactttttcacttcattgtttaaaaaaaaaa

SEQ ID NO: 87522 - DNA, 40 bp, Homo sapiens
tttttttttaaacaatgaagtgaaaaagttttacaatctc

SEQ ID NO: 87523 - DNA, 40 bp, Homo sapiens
gagattgtaaaactttttcacttcattgtttaaaaaaaaa

SEQ ID NO: 87524 - DNA, 40 bp, Homo sapiens
ttttttttaaacaatgaagtgaaaaagttttacaatctct

SEQ ID NO: 87525 - DNA, 40 bp, Homo sapiens
agagattgtaaaactttttcacttcattgtttaaaaaaaa

SEQ ID NO: 87526 - DNA, 40 bp, Homo sapiens
tttttttaaacaatgaagtgaaaaagttttacaatctcta

SEQ ID NO: 87527 - DNA, 40 bp, Homo sapiens
tagagattgtaaaactttttcacttcattgtttaaaaaaa

SEQ ID NO: 87528 - DNA, 40 bp, Homo sapiens
ttttttaaacaatgaagtgaaaaagttttacaatctctag

SEQ ID NO: 87529 - DNA, 40 bp, Homo sapiens
ctagagattgtaaaactttttcacttcattgtttaaaaaa

SEQ ID NO: 87530 - DNA, 40 bp, Homo sapiens
tttttaaacaatgaagtgaaaaagttttacaatctctagg

SEQ ID NO: 87531 - DNA, 40 bp, Homo sapiens
cctagagattgtaaaactttttcacttcattgtttaaaaa

SEQ ID NO: 87532 - DNA, 40 bp, Homo sapiens
ttttaaacaatgaagtgaaaaagttttacaatctctaggt

SEQ ID NO: 87533 - DNA, 40 bp, Homo sapiens
acctagagattgtaaaactttttcacttcattgtttaaaa

SEQ ID NO: 87534 - DNA, 40 bp, Homo sapiens
tttaaacaatgaagtgaaaaagttttacaatctctaggtt

SEQ ID NO: 87535 - DNA, 40 bp, Homo sapiens
aacctagagattgtaaaactttttcacttcattgtttaaa

SEQ ID NO: 87536 - DNA, 40 bp, Homo sapiens
ttaaacaatgaagtgaaaaagttttacaatctctaggttt

SEQ ID NO: 87537 - DNA, 40 bp, Homo sapiens
aaacctagagattgtaaaactttttcacttcattgtttaa

SEQ ID NO: 87538 - DNA, 40 bp, Homo sapiens
taaacaatgaagtgaaaaagttttacaatctctaggtttg

SEQ ID NO: 87539 - DNA, 40 bp, Homo sapiens
caaacctagagattgtaaaactttttcacttcattgttta

SEQ ID NO: 87540 - DNA, 40 bp, Homo sapiens
aaacaatgaagtgaaaaagttttacaatctctaggtttgg

SEQ ID NO: 87541 - DNA, 40 bp, Homo sapiens
ccaaacctagagattgtaaaactttttcacttcattgttt

SEQ ID NO: 87542 - DNA, 40 bp, Homo sapiens
aacaatgaagtgaaaaagttttacaatctctaggtttggc

SEQ ID NO: 87543 - DNA, 40 bp, Homo sapiens
gccaaacctagagattgtaaaactttttcacttcattgtt

SEQ ID NO: 87544 - DNA, 40 bp, Homo sapiens
acaatgaagtgaaaaagttttacaatctctaggtttggct

SEQ ID NO: 87545 - DNA, 40 bp, Homo sapiens
agccaaacctagagattgtaaaactttttcacttcattgt

SEQ ID NO: 87546 - DNA, 40 bp, Homo sapiens
caatgaagtgaaaaagttttacaatctctaggtttggcta

SEQ ID NO: 87547 - DNA, 40 bp, Homo sapiens
tagccaaacctagagattgtaaaactttttcacttcattg

SEQ ID NO: 87548 - DNA, 40 bp, Homo sapiens
aatgaagtgaaaaagttttacaatctctaggtttggctag

SEQ ID NO: 87549 - DNA, 40 bp, Homo sapiens
ctagccaaacctagagattgtaaaactttttcacttcatt

SEQ ID NO: 87550 - DNA, 40 bp, Homo sapiens
atgaagtgaaaaagttttacaatctctaggtttggctagt

SEQ ID NO: 87551 - DNA, 40 bp, Homo sapiens
actagccaaacctagagattgtaaaactttttcacttcat

SEQ ID NO: 87552 - DNA, 40 bp, Homo sapiens
tgaagtgaaaaagttttacaatctctaggtttggctagtt

SEQ ID NO: 87553 - DNA, 40 bp, Homo sapiens
aactagccaaacctagagattgtaaaactttttcacttca

SEQ ID NO: 87554 - DNA, 40 bp, Homo sapiens
gaagtgaaaaagttttacaatctctaggtttggctagttc

SEQ ID NO: 87555 - DNA, 40 bp, Homo sapiens
gaactagccaaacctagagattgtaaaactttttcacttc

SEQ ID NO: 87556 - DNA, 40 bp, Homo sapiens
aagtgaaaaagttttacaatctctaggtttggctagttct

SEQ ID NO: 87557 - DNA, 40 bp, Homo sapiens
agaactagccaaacctagagattgtaaaactttttcactt

SEQ ID NO: 87558 - DNA, 40 bp, Homo sapiens
agtgaaaaagttttacaatctctaggtttggctagttctc

SEQ ID NO: 87559 - DNA, 40 bp, Homo sapiens
gagaactagccaaacctagagattgtaaaactttttcact

SEQ ID NO: 87560 - DNA, 40 bp, Homo sapiens
gtgaaaaagttttacaatctctaggtttggctagttctct

SEQ ID NO: 87561 - DNA, 40 bp, Homo sapiens
agagaactagccaaacctagagattgtaaaactttttcac

SEQ ID NO: 87562 - DNA, 40 bp, Homo sapiens
tgaaaaagttttacaatctctaggtttggctagttctctt

SEQ ID NO: 87563 - DNA, 40 bp, Homo sapiens
aagagaactagccaaacctagagattgtaaaactttttca

SEQ ID NO: 87564 - DNA, 40 bp, Homo sapiens
gaaaaagttttacaatctctaggtttggctagttctctta

SEQ ID NO: 87565 - DNA, 40 bp, Homo sapiens
taagagaactagccaaacctagagattgtaaaactttttc

SEQ ID NO: 87566 - DNA, 40 bp, Homo sapiens
aaaaagttttacaatctctaggtttggctagttctcttaa

SEQ ID NO: 87567 - DNA, 40 bp, Homo sapiens
ttaagagaactagccaaacctagagattgtaaaacttttt

SEQ ID NO: 87568 - DNA, 40 bp, Homo sapiens
aaaagttttacaatctctaggtttggctagttctcttaac

SEQ ID NO: 87569 - DNA, 40 bp, Homo sapiens
gttaagagaactagccaaacctagagattgtaaaactttt

SEQ ID NO: 87570 - DNA, 40 bp, Homo sapiens
aaagttttacaatctctaggtttggctagttctcttaaca

SEQ ID NO: 87571 - DNA, 40 bp, Homo sapiens
tgttaagagaactagccaaacctagagattgtaaaacttt

SEQ ID NO: 87572 - DNA, 40 bp, Homo sapiens
aagttttacaatctctaggtttggctagttctcttaacac

SEQ ID NO: 87573 - DNA, 40 bp, Homo sapiens
gtgttaagagaactagccaaacctagagattgtaaaactt

SEQ ID NO: 87574 - DNA, 40 bp, Homo sapiens
agttttacaatctctaggtttggctagttctcttaacact

SEQ ID NO: 87575 - DNA, 40 bp, Homo sapiens
agtgttaagagaactagccaaacctagagattgtaaaact

SEQ ID NO: 87576 - DNA, 40 bp, Homo sapiens
gttttacaatctctaggtttggctagttctcttaacactg

SEQ ID NO: 87577 - DNA, 40 bp, Homo sapiens
cagtgttaagagaactagccaaacctagagattgtaaaac

SEQ ID NO: 87578 - DNA, 40 bp, Homo sapiens
ttttacaatctctaggtttggctagttctcttaacactgg

SEQ ID NO: 87579 - DNA, 40 bp, Homo sapiens
ccagtgttaagagaactagccaaacctagagattgtaaaa

SEQ ID NO: 87580 - DNA, 40 bp, Homo sapiens
tttacaatctctaggtttggctagttctcttaacactggt

SEQ ID NO: 87581 - DNA, 40 bp, Homo sapiens
accagtgttaagagaactagccaaacctagagattgtaaa

SEQ ID NO: 87582 - DNA, 40 bp, Homo sapiens
ttacaatctctaggtttggctagttctcttaacactggtt

SEQ ID NO: 87583 - DNA, 40 bp, Homo sapiens
aaccagtgttaagagaactagccaaacctagagattgtaa

SEQ ID NO: 87584 - DNA, 40 bp, Homo sapiens
tacaatctctaggtttggctagttctcttaacactggtta

SEQ ID NO: 87585 - DNA, 40 bp, Homo sapiens
taaccagtgttaagagaactagccaaacctagagattgta

SEQ ID NO: 87586 - DNA, 40 bp, Homo sapiens
acaatctctaggtttggctagttctcttaacactggttaa

SEQ ID NO: 87587 - DNA, 40 bp, Homo sapiens
ttaaccagtgttaagagaactagccaaacctagagattgt

SEQ ID NO: 87588 - DNA, 40 bp, Homo sapiens
caatctctaggtttggctagttctcttaacactggttaaa

SEQ ID NO: 87589 - DNA, 40 bp, Homo sapiens
tttaaccagtgttaagagaactagccaaacctagagattg

SEQ ID NO: 87590 - DNA, 40 bp, Homo sapiens
aatctctaggtttggctagttctcttaacactggttaaat

SEQ ID NO: 87591 - DNA, 40 bp, Homo sapiens
atttaaccagtgttaagagaactagccaaacctagagatt

SEQ ID NO: 87592 - DNA, 40 bp, Homo sapiens
atctctaggtttggctagttctcttaacactggttaaatt

SEQ ID NO: 87593 - DNA, 40 bp, Homo sapiens
aatttaaccagtgttaagagaactagccaaacctagagat

SEQ ID NO: 87594 - DNA, 40 bp, Homo sapiens
tctctaggtttggctagttctcttaacactggttaaatta

SEQ ID NO: 87595 - DNA, 40 bp, Homo sapiens
taatttaaccagtgttaagagaactagccaaacctagaga

SEQ ID NO: 87596 - DNA, 40 bp, Homo sapiens
ctctaggtttggctagttctcttaacactggttaaattaa

SEQ ID NO: 87597 - DNA, 40 bp, Homo sapiens
ttaatttaaccagtgttaagagaactagccaaacctagag

SEQ ID NO: 87598 - DNA, 40 bp, Homo sapiens
tctaggtttggctagttctcttaacactggttaaattaac

SEQ ID NO: 87599 - DNA, 40 bp, Homo sapiens
gttaatttaaccagtgttaagagaactagccaaacctaga

SEQ ID NO: 87600 - DNA, 40 bp, Homo sapiens
ctaggtttggctagttctcttaacactggttaaattaaca

SEQ ID NO: 87601 - DNA, 40 bp, Homo sapiens
tgttaatttaaccagtgttaagagaactagccaaacctag

SEQ ID NO: 87602 - DNA, 40 bp, Homo sapiens
taggtttggctagttctcttaacactggttaaattaacat

SEQ ID NO: 87603 - DNA, 40 bp, Homo sapiens
atgttaatttaaccagtgttaagagaactagccaaaccta

SEQ ID NO: 87604 - DNA, 40 bp, Homo sapiens
aggtttggctagttctcttaacactggttaaattaacatt

SEQ ID NO: 87605 - DNA, 40 bp, Homo sapiens
aatgttaatttaaccagtgttaagagaactagccaaacct

SEQ ID NO: 87606 - DNA, 40 bp, Homo sapiens
ggtttggctagttctcttaacactggttaaattaacattg

SEQ ID NO: 87607 - DNA, 40 bp, Homo sapiens
caatgttaatttaaccagtgttaagagaactagccaaacc

SEQ ID NO: 87608 - DNA, 40 bp, Homo sapiens
gtttggctagttctcttaacactggttaaattaacattgc

SEQ ID NO: 87609 - DNA, 40 bp, Homo sapiens
gcaatgttaatttaaccagtgttaagagaactagccaaac

SEQ ID NO: 87610 - DNA, 40 bp, Homo sapiens
tttggctagttctcttaacactggttaaattaacattgca

SEQ ID NO: 87611 - DNA, 40 bp, Homo sapiens
tgcaatgttaatttaaccagtgttaagagaactagccaaa

SEQ ID NO: 87612 - DNA, 40 bp, Homo sapiens
ttggctagttctcttaacactggttaaattaacattgcat

SEQ ID NO: 87613 - DNA, 40 bp, Homo sapiens
atgcaatgttaatttaaccagtgttaagagaactagccaa

SEQ ID NO: 87614 - DNA, 40 bp, Homo sapiens
tggctagttctcttaacactggttaaattaacattgcata

SEQ ID NO: 87615 - DNA, 40 bp, Homo sapiens
tatgcaatgttaatttaaccagtgttaagagaactagcca

SEQ ID NO: 87616 - DNA, 40 bp, Homo sapiens
ggctagttctcttaacactggttaaattaacattgcataa

SEQ ID NO: 87617 - DNA, 40 bp, Homo sapiens
ttatgcaatgttaatttaaccagtgttaagagaactagcc

SEQ ID NO: 87618 - DNA, 40 bp, Homo sapiens
gctagttctcttaacactggttaaattaacattgcataaa

SEQ ID NO: 87619 - DNA, 40 bp, Homo sapiens
tttatgcaatgttaatttaaccagtgttaagagaactagc

SEQ ID NO: 87620 - DNA, 40 bp, Homo sapiens
ctagttctcttaacactggttaaattaacattgcataaac

SEQ ID NO: 87621 - DNA, 40 bp, Homo sapiens
gtttatgcaatgttaatttaaccagtgttaagagaactag

SEQ ID NO: 87622 - DNA, 40 bp, Homo sapiens
tagttctcttaacactggttaaattaacattgcataaaca

SEQ ID NO: 87623 - DNA, 40 bp, Homo sapiens
tgtttatgcaatgttaatttaaccagtgttaagagaacta

SEQ ID NO: 87624 - DNA, 40 bp, Homo sapiens
agttctcttaacactggttaaattaacattgcataaacac

SEQ ID NO: 87625 - DNA, 40 bp, Homo sapiens
gtgtttatgcaatgttaatttaaccagtgttaagagaact

SEQ ID NO: 87626 - DNA, 40 bp, Homo sapiens
gttctcttaacactggttaaattaacattgcataaacact

SEQ ID NO: 87627 - DNA, 40 bp, Homo sapiens
agtgtttatgcaatgttaatttaaccagtgttaagagaac

SEQ ID NO: 87628 - DNA, 40 bp, Homo sapiens
ttctcttaacactggttaaattaacattgcataaacactt

SEQ ID NO: 87629 - DNA, 40 bp, Homo sapiens
aagtgtttatgcaatgttaatttaaccagtgttaagagaa

SEQ ID NO: 87630 - DNA, 40 bp, Homo sapiens
tctcttaacactggttaaattaacattgcataaacacttt

SEQ ID NO: 87631 - DNA, 40 bp, Homo sapiens
aaagtgtttatgcaatgttaatttaaccagtgttaagaga

SEQ ID NO: 87632 - DNA, 40 bp, Homo sapiens
ctcttaacactggttaaattaacattgcataaacactttt

SEQ ID NO: 87633 - DNA, 40 bp, Homo sapiens
aaaagtgtttatgcaatgttaatttaaccagtgttaagag

SEQ ID NO: 87634 - DNA, 40 bp, Homo sapiens
tcttaacactggttaaattaacattgcataaacacttttc

SEQ ID NO: 87635 - DNA, 40 bp, Homo sapiens
gaaaagtgtttatgcaatgttaatttaaccagtgttaaga

SEQ ID NO: 87636 - DNA, 40 bp, Homo sapiens
cttaacactggttaaattaacattgcataaacacttttca

SEQ ID NO: 87637 - DNA, 40 bp, Homo sapiens
tgaaaagtgtttatgcaatgttaatttaaccagtgttaag

SEQ ID NO: 87638 - DNA, 40 bp, Homo sapiens
ttaacactggttaaattaacattgcataaacacttttcaa

SEQ ID NO: 87639 - DNA, 40 bp, Homo sapiens
ttgaaaagtgtttatgcaatgttaatttaaccagtgttaa

SEQ ID NO: 87640 - DNA, 40 bp, Homo sapiens
taacactggttaaattaacattgcataaacacttttcaag

SEQ ID NO: 87641 - DNA, 40 bp, Homo sapiens
cttgaaaagtgtttatgcaatgttaatttaaccagtgtta

SEQ ID NO: 87642 - DNA, 40 bp, Homo sapiens
aacactggttaaattaacattgcataaacacttttcaagt

SEQ ID NO: 87643 - DNA, 40 bp, Homo sapiens
acttgaaaagtgtttatgcaatgttaatttaaccagtgtt

SEQ ID NO: 87644 - DNA, 40 bp, Homo sapiens
acactggttaaattaacattgcataaacacttttcaagtc

SEQ ID NO: 87645 - DNA, 40 bp, Homo sapiens
gacttgaaaagtgtttatgcaatgttaatttaaccagtgt

SEQ ID NO: 87646 - DNA, 40 bp, Homo sapiens
cactggttaaattaacattgcataaacacttttcaagtct

SEQ ID NO: 87647 - DNA, 40 bp, Homo sapiens
agacttgaaaagtgtttatgcaatgttaatttaaccagtg

SEQ ID NO: 87648 - DNA, 40 bp, Homo sapiens
actggttaaattaacattgcataaacacttttcaagtctg

SEQ ID NO: 87649 - DNA, 40 bp, Homo sapiens
cagacttgaaaagtgtttatgcaatgttaatttaaccagt

SEQ ID NO: 87650 - DNA, 40 bp, Homo sapiens
ctggttaaattaacattgcataaacacttttcaagtctga

SEQ ID NO: 87651 - DNA, 40 bp, Homo sapiens
tcagacttgaaaagtgtttatgcaatgttaatttaaccag

SEQ ID NO: 87652 - DNA, 40 bp, Homo sapiens
tggttaaattaacattgcataaacacttttcaagtctgat

SEQ ID NO: 87653 - DNA, 40 bp, Homo sapiens
atcagacttgaaaagtgtttatgcaatgttaatttaacca

SEQ ID NO: 87654 - DNA, 40 bp, Homo sapiens
ggttaaattaacattgcataaacacttttcaagtctgatc

SEQ ID NO: 87655 - DNA, 40 bp, Homo sapiens
gatcagacttgaaaagtgtttatgcaatgttaatttaacc

SEQ ID NO: 87656 - DNA, 40 bp, Homo sapiens
gttaaattaacattgcataaacacttttcaagtctgatcc

SEQ ID NO: 87657 - DNA, 40 bp, Homo sapiens
ggatcagacttgaaaagtgtttatgcaatgttaatttaac

SEQ ID NO: 87658 - DNA, 40 bp, Homo sapiens
ttaaattaacattgcataaacacttttcaagtctgatcca

SEQ ID NO: 87659 - DNA, 40 bp, Homo sapiens
tggatcagacttgaaaagtgtttatgcaatgttaatttaa

SEQ ID NO: 87660 - DNA, 40 bp, Homo sapiens
taaattaacattgcataaacacttttcaagtctgatccat

SEQ ID NO: 87661 - DNA, 40 bp, Homo sapiens
atggatcagacttgaaaagtgtttatgcaatgttaattta

SEQ ID NO: 87662 - DNA, 40 bp, Homo sapiens
aaattaacattgcataaacacttttcaagtctgatccata

SEQ ID NO: 87663 - DNA, 40 bp, Homo sapiens
tatggatcagacttgaaaagtgtttatgcaatgttaattt

SEQ ID NO: 87664 - DNA, 40 bp, Homo sapiens
aattaacattgcataaacacttttcaagtctgatccatat

SEQ ID NO: 87665 - DNA, 40 bp, Homo sapiens
atatggatcagacttgaaaagtgtttatgcaatgttaatt

SEQ ID NO: 87666 - DNA, 40 bp, Homo sapiens
attaacattgcataaacacttttcaagtctgatccatatt

SEQ ID NO: 87667 - DNA, 40 bp, Homo sapiens
aatatggatcagacttgaaaagtgtttatgcaatgttaat

SEQ ID NO: 87668 - DNA, 40 bp, Homo sapiens
ttaacattgcataaacacttttcaagtctgatccatattt

SEQ ID NO: 87669 - DNA, 40 bp, Homo sapiens
aaatatggatcagacttgaaaagtgtttatgcaatgttaa

SEQ ID NO: 87670 - DNA, 40 bp, Homo sapiens
taacattgcataaacacttttcaagtctgatccatattta

SEQ ID NO: 87671 - DNA, 40 bp, Homo sapiens
taaatatggatcagacttgaaaagtgtttatgcaatgtta

SEQ ID NO: 87672 - DNA, 40 bp, Homo sapiens
aacattgcataaacacttttcaagtctgatccatatttaa

SEQ ID NO: 87673 - DNA, 40 bp, Homo sapiens
ttaaatatggatcagacttgaaaagtgtttatgcaatgtt

SEQ ID NO: 87674 - DNA, 40 bp, Homo sapiens
acattgcataaacacttttcaagtctgatccatatttaat

SEQ ID NO: 87675 - DNA, 40 bp, Homo sapiens
attaaatatggatcagacttgaaaagtgtttatgcaatgt

SEQ ID NO: 87676 - DNA, 40 bp, Homo sapiens
cattgcataaacacttttcaagtctgatccatatttaata

SEQ ID NO: 87677 - DNA, 40 bp, Homo sapiens
tattaaatatggatcagacttgaaaagtgtttatgcaatg

SEQ ID NO: 87678 - DNA, 40 bp, Homo sapiens
attgcataaacacttttcaagtctgatccatatttaataa

SEQ ID NO: 87679 - DNA, 40 bp, Homo sapiens
ttattaaatatggatcagacttgaaaagtgtttatgcaat

SEQ ID NO: 87680 - DNA, 40 bp, Homo sapiens
ttgcataaacacttttcaagtctgatccatatttaataat

SEQ ID NO: 87681 - DNA, 40 bp, Homo sapiens
attattaaatatggatcagacttgaaaagtgtttatgcaa

SEQ ID NO: 87682 - DNA, 40 bp, Homo sapiens
tgcataaacacttttcaagtctgatccatatttaataatg

SEQ ID NO: 87683 - DNA, 40 bp, Homo sapiens
cattattaaatatggatcagacttgaaaagtgtttatgca

SEQ ID NO: 87684 - DNA, 40 bp, Homo sapiens
gcataaacacttttcaagtctgatccatatttaataatgc

SEQ ID NO: 87685 - DNA, 40 bp, Homo sapiens
gcattattaaatatggatcagacttgaaaagtgtttatgc

SEQ ID NO: 87686 - DNA, 40 bp, Homo sapiens
cataaacacttttcaagtctgatccatatttaataatgct

SEQ ID NO: 87687 - DNA, 40 bp, Homo sapiens
agcattattaaatatggatcagacttgaaaagtgtttatg

SEQ ID NO: 87688 - DNA, 40 bp, Homo sapiens
ataaacacttttcaagtctgatccatatttaataatgctt

SEQ ID NO: 87689 - DNA, 40 bp, Homo sapiens
aagcattattaaatatggatcagacttgaaaagtgtttat

SEQ ID NO: 87690 - DNA, 40 bp, Homo sapiens
taaacacttttcaagtctgatccatatttaataatgcttt

SEQ ID NO: 87691 - DNA, 40 bp, Homo sapiens
aaagcattattaaatatggatcagacttgaaaagtgttta

SEQ ID NO: 87692 - DNA, 40 bp, Homo sapiens
aaacacttttcaagtctgatccatatttaataatgcttta

SEQ ID NO: 87693 - DNA, 40 bp, Homo sapiens
taaagcattattaaatatggatcagacttgaaaagtgttt

SEQ ID NO: 87694 - DNA, 40 bp, Homo sapiens
aacacttttcaagtctgatccatatttaataatgctttaa

SEQ ID NO: 87695 - DNA, 40 bp, Homo sapiens
ttaaagcattattaaatatggatcagacttgaaaagtgtt

SEQ ID NO: 87696 - DNA, 40 bp, Homo sapiens
acacttttcaagtctgatccatatttaataatgctttaaa

SEQ ID NO: 87697 - DNA, 40 bp, Homo sapiens
tttaaagcattattaaatatggatcagacttgaaaagtgt

SEQ ID NO: 87698 - DNA, 40 bp, Homo sapiens
cacttttcaagtctgatccatatttaataatgctttaaaa

SEQ ID NO: 87699 - DNA, 40 bp, Homo sapiens
ttttaaagcattattaaatatggatcagacttgaaaagtg

SEQ ID NO: 87700 - DNA, 40 bp, Homo sapiens
acttttcaagtctgatccatatttaataatgctttaaaat

SEQ ID NO: 87701 - DNA, 40 bp, Homo sapiens
attttaaagcattattaaatatggatcagacttgaaaagt

SEQ ID NO: 87702 - DNA, 40 bp, Homo sapiens
cttttcaagtctgatccatatttaataatgctttaaaata

SEQ ID NO: 87703 - DNA, 40 bp, Homo sapiens
tattttaaagcattattaaatatggatcagacttgaaaag

SEQ ID NO: 87704 - DNA, 40 bp, Homo sapiens
ttttcaagtctgatccatatttaataatgctttaaaataa

SEQ ID NO: 87705 - DNA, 40 bp, Homo sapiens
ttattttaaagcattattaaatatggatcagacttgaaaa

SEQ ID NO: 87706 - DNA, 40 bp, Homo sapiens
tttcaagtctgatccatatttaataatgctttaaaataaa

SEQ ID NO: 87707 - DNA, 40 bp, Homo sapiens
tttattttaaagcattattaaatatggatcagacttgaaa

SEQ ID NO: 87708 - DNA, 40 bp, Homo sapiens
ttcaagtctgatccatatttaataatgctttaaaataaaa

SEQ ID NO: 87709 - DNA, 40 bp, Homo sapiens
ttttattttaaagcattattaaatatggatcagacttgaa

SEQ ID NO: 87710 - DNA, 40 bp, Homo sapiens
tcaagtctgatccatatttaataatgctttaaaataaaaa

SEQ ID NO: 87711 - DNA, 40 bp, Homo sapiens
tttttattttaaagcattattaaatatggatcagacttga

SEQ ID NO: 87712 - DNA, 40 bp, Homo sapiens
caagtctgatccatatttaataatgctttaaaataaaaat

SEQ ID NO: 87713 - DNA, 40 bp, Homo sapiens
atttttattttaaagcattattaaatatggatcagacttg

SEQ ID NO: 87714 - DNA, 40 bp, Homo sapiens
aagtctgatccatatttaataatgctttaaaataaaaata

SEQ ID NO: 87715 - DNA, 40 bp, Homo sapiens
tatttttattttaaagcattattaaatatggatcagactt

SEQ ID NO: 87716 - DNA, 40 bp, Homo sapiens
agtctgatccatatttaataatgctttaaaataaaaataa

SEQ ID NO: 87717 - DNA, 40 bp, Homo sapiens
ttatttttattttaaagcattattaaatatggatcagact

SEQ ID NO: 87718 - DNA, 40 bp, Homo sapiens
gtctgatccatatttaataatgctttaaaataaaaataaa

SEQ ID NO: 87719 - DNA, 40 bp, Homo sapiens
tttatttttattttaaagcattattaaatatggatcagac

SEQ ID NO: 87720 - DNA, 40 bp, Homo sapiens
tctgatccatatttaataatgctttaaaataaaaataaaa

SEQ ID NO: 87721 - DNA, 40 bp, Homo sapiens
ttttatttttattttaaagcattattaaatatggatcaga

SEQ ID NO: 87722 - DNA, 40 bp, Homo sapiens
ctgatccatatttaataatgctttaaaataaaaataaaaa

SEQ ID NO: 87723 - DNA, 40 bp, Homo sapiens
tttttatttttattttaaagcattattaaatatggatcag

SEQ ID NO: 87724 - DNA, 40 bp, Homo sapiens
tgatccatatttaataatgctttaaaataaaaataaaaac

SEQ ID NO: 87725 - DNA, 40 bp, Homo sapiens
gtttttatttttattttaaagcattattaaatatggatca

SEQ ID NO: 87726 - DNA, 40 bp, Homo sapiens
gatccatatttaataatgctttaaaataaaaataaaaaca

SEQ ID NO: 87727 - DNA, 40 bp, Homo sapiens
tgtttttatttttattttaaagcattattaaatatggatc

SEQ ID NO: 87728 - DNA, 40 bp, Homo sapiens
atccatatttaataatgctttaaaataaaaataaaaacaa

SEQ ID NO: 87729 - DNA, 40 bp, Homo sapiens
ttgtttttatttttattttaaagcattattaaatatggat

SEQ ID NO: 87730 - DNA, 40 bp, Homo sapiens
tccatatttaataatgctttaaaataaaaataaaaacaat

SEQ ID NO: 87731 - DNA, 40 bp, Homo sapiens
attgtttttatttttattttaaagcattattaaatatgga

SEQ ID NO: 87732 - DNA, 40 bp, Homo sapiens
ccatatttaataatgctttaaaataaaaataaaaacaatc

SEQ ID NO: 87733 - DNA, 40 bp, Homo sapiens
gattgtttttatttttattttaaagcattattaaatatgg

SEQ ID NO: 87734 - DNA, 40 bp, Homo sapiens
catatttaataatgctttaaaataaaaataaaaacaatcc

SEQ ID NO: 87735 - DNA, 40 bp, Homo sapiens
ggattgtttttatttttattttaaagcattattaaatatg

SEQ ID NO: 87736 - DNA, 40 bp, Homo sapiens
atatttaataatgctttaaaataaaaataaaaacaatcct

SEQ ID NO: 87737 - DNA, 40 bp, Homo sapiens
aggattgtttttatttttattttaaagcattattaaatat

SEQ ID NO: 87738 - DNA, 40 bp, Homo sapiens
tatttaataatgctttaaaataaaaataaaaacaatcctt

SEQ ID NO: 87739 - DNA, 40 bp, Homo sapiens
aaggattgtttttatttttattttaaagcattattaaata

SEQ ID NO: 87740 - DNA, 40 bp, Homo sapiens
atttaataatgctttaaaataaaaataaaaacaatccttt

SEQ ID NO: 87741 - DNA, 40 bp, Homo sapiens
aaaggattgtttttatttttattttaaagcattattaaat

SEQ ID NO: 87742 - DNA, 40 bp, Homo sapiens
tttaataatgctttaaaataaaaataaaaacaatcctttt

SEQ ID NO: 87743 - DNA, 40 bp, Homo sapiens
aaaaggattgtttttatttttattttaaagcattattaaa

SEQ ID NO: 87744 - DNA, 40 bp, Homo sapiens
ttaataatgctttaaaataaaaataaaaacaatccttttg

SEQ ID NO: 87745 - DNA, 40 bp, Homo sapiens
caaaaggattgtttttatttttattttaaagcattattaa

SEQ ID NO: 87746 - DNA, 40 bp, Homo sapiens
taataatgctttaaaataaaaataaaaacaatccttttga

SEQ ID NO: 87747 - DNA, 40 bp, Homo sapiens
tcaaaaggattgtttttatttttattttaaagcattatta

SEQ ID NO: 87748 - DNA, 40 bp, Homo sapiens
aataatgctttaaaataaaaataaaaacaatccttttgat

SEQ ID NO: 87749 - DNA, 40 bp, Homo sapiens
atcaaaaggattgtttttatttttattttaaagcattatt

SEQ ID NO: 87750 - DNA, 40 bp, Homo sapiens
ataatgctttaaaataaaaataaaaacaatccttttgata

SEQ ID NO: 87751 - DNA, 40 bp, Homo sapiens
tatcaaaaggattgtttttatttttattttaaagcattat

SEQ ID NO: 87752 - DNA, 40 bp, Homo sapiens
taatgctttaaaataaaaataaaaacaatccttttgataa

SEQ ID NO: 87753 - DNA, 40 bp, Homo sapiens
ttatcaaaaggattgtttttatttttattttaaagcatta

SEQ ID NO: 87754 - DNA, 40 bp, Homo sapiens
aatgctttaaaataaaaataaaaacaatccttttgataaa

SEQ ID NO: 87755 - DNA, 40 bp, Homo sapiens
tttatcaaaaggattgtttttatttttattttaaagcatt

SEQ ID NO: 87756 - DNA, 40 bp, Homo sapiens
atgctttaaaataaaaataaaaacaatccttttgataaat

SEQ ID NO: 87757 - DNA, 40 bp, Homo sapiens
atttatcaaaaggattgtttttatttttattttaaagcat

SEQ ID NO: 87758 - DNA, 40 bp, Homo sapiens
tgctttaaaataaaaataaaaacaatccttttgataaatt

SEQ ID NO: 87759 - DNA, 40 bp, Homo sapiens
aatttatcaaaaggattgtttttatttttattttaaagca

SEQ ID NO: 87760 - DNA, 40 bp, Homo sapiens
gctttaaaataaaaataaaaacaatccttttgataaattt

SEQ ID NO: 87761 - DNA, 40 bp, Homo sapiens
aaatttatcaaaaggattgtttttatttttattttaaagc

SEQ ID NO: 87762 - DNA, 40 bp, Homo sapiens
ctttaaaataaaaataaaaacaatccttttgataaattta

SEQ ID NO: 87763 - DNA, 40 bp, Homo sapiens
taaatttatcaaaaggattgtttttatttttattttaaag

SEQ ID NO: 87764 - DNA, 40 bp, Homo sapiens
tttaaaataaaaataaaaacaatccttttgataaatttaa

SEQ ID NO: 87765 - DNA, 40 bp, Homo sapiens
ttaaatttatcaaaaggattgtttttatttttattttaaa

SEQ ID NO: 87766 - DNA, 40 bp, Homo sapiens
ttaaaataaaaataaaaacaatccttttgataaatttaaa

SEQ ID NO: 87767 - DNA, 40 bp, Homo sapiens
tttaaatttatcaaaaggattgtttttatttttattttaa

SEQ ID NO: 87768 - DNA, 40 bp, Homo sapiens
taaaataaaaataaaaacaatccttttgataaatttaaaa

SEQ ID NO: 87769 - DNA, 40 bp, Homo sapiens
ttttaaatttatcaaaaggattgtttttatttttatttta

SEQ ID NO: 87770 - DNA, 40 bp, Homo sapiens
aaaataaaaataaaaacaatccttttgataaatttaaaat

SEQ ID NO: 87771 - DNA, 40 bp, Homo sapiens
attttaaatttatcaaaaggattgtttttatttttatttt

SEQ ID NO: 87772 - DNA, 40 bp, Homo sapiens
aaataaaaataaaaacaatccttttgataaatttaaaatg

SEQ ID NO: 87773 - DNA, 40 bp, Homo sapiens
cattttaaatttatcaaaaggattgtttttatttttattt

SEQ ID NO: 87774 - DNA, 40 bp, Homo sapiens
aataaaaataaaaacaatccttttgataaatttaaaatgt

SEQ ID NO: 87775 - DNA, 40 bp, Homo sapiens
acattttaaatttatcaaaaggattgtttttatttttatt

SEQ ID NO: 87776 - DNA, 40 bp, Homo sapiens
ataaaaataaaaacaatccttttgataaatttaaaatgtt

SEQ ID NO: 87777 - DNA, 40 bp, Homo sapiens
aacattttaaatttatcaaaaggattgtttttatttttat

SEQ ID NO: 87778 - DNA, 40 bp, Homo sapiens
taaaaataaaaacaatccttttgataaatttaaaatgtta

SEQ ID NO: 87779 - DNA, 40 bp, Homo sapiens
taacattttaaatttatcaaaaggattgtttttattttta

SEQ ID NO: 87780 - DNA, 40 bp, Homo sapiens
aaaaataaaaacaatccttttgataaatttaaaatgttac

SEQ ID NO: 87781 - DNA, 40 bp, Homo sapiens
gtaacattttaaatttatcaaaaggattgtttttattttt

SEQ ID NO: 87782 - DNA, 40 bp, Homo sapiens
aaaataaaaacaatccttttgataaatttaaaatgttact

SEQ ID NO: 87783 - DNA, 40 bp, Homo sapiens
agtaacattttaaatttatcaaaaggattgtttttatttt

SEQ ID NO: 87784 - DNA, 40 bp, Homo sapiens
aaataaaaacaatccttttgataaatttaaaatgttactt

SEQ ID NO: 87785 - DNA, 40 bp, Homo sapiens
aagtaacattttaaatttatcaaaaggattgtttttattt

SEQ ID NO: 87786 - DNA, 40 bp, Homo sapiens
aataaaaacaatccttttgataaatttaaaatgttactta

SEQ ID NO: 87787 - DNA, 40 bp, Homo sapiens
taagtaacattttaaatttatcaaaaggattgtttttatt

SEQ ID NO: 87788 - DNA, 40 bp, Homo sapiens
ataaaaacaatccttttgataaatttaaaatgttacttat

SEQ ID NO: 87789 - DNA, 40 bp, Homo sapiens
ataagtaacattttaaatttatcaaaaggattgtttttat

SEQ ID NO: 87790 - DNA, 40 bp, Homo sapiens
taaaaacaatccttttgataaatttaaaatgttacttatt

SEQ ID NO: 87791 - DNA, 40 bp, Homo sapiens
aataagtaacattttaaatttatcaaaaggattgttttta

SEQ ID NO: 87792 - DNA, 40 bp, Homo sapiens
aaaaacaatccttttgataaatttaaaatgttacttattt

SEQ ID NO: 87793 - DNA, 40 bp, Homo sapiens
aaataagtaacattttaaatttatcaaaaggattgttttt

SEQ ID NO: 87794 - DNA, 40 bp, Homo sapiens
aaaacaatccttttgataaatttaaaatgttacttatttt

SEQ ID NO: 87795 - DNA, 40 bp, Homo sapiens
aaaataagtaacattttaaatttatcaaaaggattgtttt

SEQ ID NO: 87796 - DNA, 40 bp, Homo sapiens
aaacaatccttttgataaatttaaaatgttacttatttta

SEQ ID NO: 87797 - DNA, 40 bp, Homo sapiens
taaaataagtaacattttaaatttatcaaaaggattgttt

SEQ ID NO: 87798 - DNA, 40 bp, Homo sapiens
aacaatccttttgataaatttaaaatgttacttattttaa

SEQ ID NO: 87799 - DNA, 40 bp, Homo sapiens
ttaaaataagtaacattttaaatttatcaaaaggattgtt

SEQ ID NO: 87800 - DNA, 40 bp, Homo sapiens
acaatccttttgataaatttaaaatgttacttattttaaa

SEQ ID NO: 87801 - DNA, 40 bp, Homo sapiens
tttaaaataagtaacattttaaatttatcaaaaggattgt

SEQ ID NO: 87802 - DNA, 40 bp, Homo sapiens
caatccttttgataaatttaaaatgttacttattttaaaa

SEQ ID NO: 87803 - DNA, 40 bp, Homo sapiens
ttttaaaataagtaacattttaaatttatcaaaaggattg

SEQ ID NO: 87804 - DNA, 40 bp, Homo sapiens
aatccttttgataaatttaaaatgttacttattttaaaat

SEQ ID NO: 87805 - DNA, 40 bp, Homo sapiens
attttaaaataagtaacattttaaatttatcaaaaggatt

SEQ ID NO: 87806 - DNA, 40 bp, Homo sapiens
atccttttgataaatttaaaatgttacttattttaaaata

SEQ ID NO: 87807 - DNA, 40 bp, Homo sapiens
tattttaaaataagtaacattttaaatttatcaaaaggat

SEQ ID NO: 87808 - DNA, 40 bp, Homo sapiens
tccttttgataaatttaaaatgttacttattttaaaataa

SEQ ID NO: 87809 - DNA, 40 bp, Homo sapiens
ttattttaaaataagtaacattttaaatttatcaaaagga

SEQ ID NO: 87810 - DNA, 40 bp, Homo sapiens
ccttttgataaatttaaaatgttacttattttaaaataaa

SEQ ID NO: 87811 - DNA, 40 bp, Homo sapiens
tttattttaaaataagtaacattttaaatttatcaaaagg

SEQ ID NO: 87812 - DNA, 40 bp, Homo sapiens
cttttgataaatttaaaatgttacttattttaaaataaat

SEQ ID NO: 87813 - DNA, 40 bp, Homo sapiens
atttattttaaaataagtaacattttaaatttatcaaaag

SEQ ID NO: 87814 - DNA, 40 bp, Homo sapiens
ttttgataaatttaaaatgttacttattttaaaataaatg

SEQ ID NO: 87815 - DNA, 40 bp, Homo sapiens
catttattttaaaataagtaacattttaaatttatcaaaa

SEQ ID NO: 87816 - DNA, 40 bp, Homo sapiens
tttgataaatttaaaatgttacttattttaaaataaatga

SEQ ID NO: 87817 - DNA, 40 bp, Homo sapiens
tcatttattttaaaataagtaacattttaaatttatcaaa

SEQ ID NO: 87818 - DNA, 40 bp, Homo sapiens
ttgataaatttaaaatgttacttattttaaaataaatgaa

SEQ ID NO: 87819 - DNA, 40 bp, Homo sapiens
ttcatttattttaaaataagtaacattttaaatttatcaa

SEQ ID NO: 87820 - DNA, 40 bp, Homo sapiens
tgataaatttaaaatgttacttattttaaaataaatgaag

SEQ ID NO: 87821 - DNA, 40 bp, Homo sapiens
cttcatttattttaaaataagtaacattttaaatttatca

SEQ ID NO: 87822 - DNA, 40 bp, Homo sapiens
gataaatttaaaatgttacttattttaaaataaatgaagt

SEQ ID NO: 87823 - DNA, 40 bp, Homo sapiens
acttcatttattttaaaataagtaacattttaaatttatc

SEQ ID NO: 87824 - DNA, 40 bp, Homo sapiens
ataaatttaaaatgttacttattttaaaataaatgaagtg

SEQ ID NO: 87825 - DNA, 40 bp, Homo sapiens
cacttcatttattttaaaataagtaacattttaaatttat

SEQ ID NO: 87826 - DNA, 40 bp, Homo sapiens
taaatttaaaatgttacttattttaaaataaatgaagtga

SEQ ID NO: 87827 - DNA, 40 bp, Homo sapiens
tcacttcatttattttaaaataagtaacattttaaattta

SEQ ID NO: 87828 - DNA, 40 bp, Homo sapiens
aaatttaaaatgttacttattttaaaataaatgaagtgag

SEQ ID NO: 87829 - DNA, 40 bp, Homo sapiens
ctcacttcatttattttaaaataagtaacattttaaattt

SEQ ID NO: 87830 - DNA, 40 bp, Homo sapiens
aatttaaaatgttacttattttaaaataaatgaagtgaga

SEQ ID NO: 87831 - DNA, 40 bp, Homo sapiens
tctcacttcatttattttaaaataagtaacattttaaatt

SEQ ID NO: 87832 - DNA, 40 bp, Homo sapiens
atttaaaatgttacttattttaaaataaatgaagtgagat

SEQ ID NO: 87833 - DNA, 40 bp, Homo sapiens
atctcacttcatttattttaaaataagtaacattttaaat

SEQ ID NO: 87834 - DNA, 40 bp, Homo sapiens
tttaaaatgttacttattttaaaataaatgaagtgagatg

SEQ ID NO: 87835 - DNA, 40 bp, Homo sapiens
catctcacttcatttattttaaaataagtaacattttaaa

SEQ ID NO: 87836 - DNA, 40 bp, Homo sapiens
ttaaaatgttacttattttaaaataaatgaagtgagatgg

SEQ ID NO: 87837 - DNA, 40 bp, Homo sapiens
ccatctcacttcatttattttaaaataagtaacattttaa

SEQ ID NO: 87838 - DNA, 40 bp, Homo sapiens
taaaatgttacttattttaaaataaatgaagtgagatggc

SEQ ID NO: 87839 - DNA, 40 bp, Homo sapiens
gccatctcacttcatttattttaaaataagtaacatttta

SEQ ID NO: 87840 - DNA, 40 bp, Homo sapiens
aaaatgttacttattttaaaataaatgaagtgagatggca

SEQ ID NO: 87841 - DNA, 40 bp, Homo sapiens
tgccatctcacttcatttattttaaaataagtaacatttt

SEQ ID NO: 87842 - DNA, 40 bp, Homo sapiens
aaatgttacttattttaaaataaatgaagtgagatggcat

SEQ ID NO: 87843 - DNA, 40 bp, Homo sapiens
atgccatctcacttcatttattttaaaataagtaacattt

SEQ ID NO: 87844 - DNA, 40 bp, Homo sapiens
aatgttacttattttaaaataaatgaagtgagatggcatg

SEQ ID NO: 87845 - DNA, 40 bp, Homo sapiens
catgccatctcacttcatttattttaaaataagtaacatt

SEQ ID NO: 87846 - DNA, 40 bp, Homo sapiens
atgttacttattttaaaataaatgaagtgagatggcatgg

SEQ ID NO: 87847 - DNA, 40 bp, Homo sapiens
ccatgccatctcacttcatttattttaaaataagtaacat

SEQ ID NO: 87848 - DNA, 40 bp, Homo sapiens
tgttacttattttaaaataaatgaagtgagatggcatggt

SEQ ID NO: 87849 - DNA, 40 bp, Homo sapiens
accatgccatctcacttcatttattttaaaataagtaaca

SEQ ID NO: 87850 - DNA, 40 bp, Homo sapiens
gttacttattttaaaataaatgaagtgagatggcatggtg

SEQ ID NO: 87851 - DNA, 40 bp, Homo sapiens
caccatgccatctcacttcatttattttaaaataagtaac

SEQ ID NO: 87852 - DNA, 40 bp, Homo sapiens
ttacttattttaaaataaatgaagtgagatggcatggtga

SEQ ID NO: 87853 - DNA, 40 bp, Homo sapiens
tcaccatgccatctcacttcatttattttaaaataagtaa

SEQ ID NO: 87854 - DNA, 40 bp, Homo sapiens
tacttattttaaaataaatgaagtgagatggcatggtgag

SEQ ID NO: 87855 - DNA, 40 bp, Homo sapiens
ctcaccatgccatctcacttcatttattttaaaataagta

SEQ ID NO: 87856 - DNA, 40 bp, Homo sapiens
acttattttaaaataaatgaagtgagatggcatggtgagg

SEQ ID NO: 87857 - DNA, 40 bp, Homo sapiens
cctcaccatgccatctcacttcatttattttaaaataagt

SEQ ID NO: 87858 - DNA, 40 bp, Homo sapiens
cttattttaaaataaatgaagtgagatggcatggtgaggt

SEQ ID NO: 87859 - DNA, 40 bp, Homo sapiens
acctcaccatgccatctcacttcatttattttaaaataag

SEQ ID NO: 87860 - DNA, 40 bp, Homo sapiens
ttattttaaaataaatgaagtgagatggcatggtgaggtg

SEQ ID NO: 87861 - DNA, 40 bp, Homo sapiens
cacctcaccatgccatctcacttcatttattttaaaataa

SEQ ID NO: 87862 - DNA, 40 bp, Homo sapiens
tattttaaaataaatgaagtgagatggcatggtgaggtga

SEQ ID NO: 87863 - DNA, 40 bp, Homo sapiens
tcacctcaccatgccatctcacttcatttattttaaaata

SEQ ID NO: 87864 - DNA, 40 bp, Homo sapiens
attttaaaataaatgaagtgagatggcatggtgaggtgaa

SEQ ID NO: 87865 - DNA, 40 bp, Homo sapiens
ttcacctcaccatgccatctcacttcatttattttaaaat

SEQ ID NO: 87866 - DNA, 40 bp, Homo sapiens
ttttaaaataaatgaagtgagatggcatggtgaggtgaaa

SEQ ID NO: 87867 - DNA, 40 bp, Homo sapiens
tttcacctcaccatgccatctcacttcatttattttaaaa

SEQ ID NO: 87868 - DNA, 40 bp, Homo sapiens
tttaaaataaatgaagtgagatggcatggtgaggtgaaag

SEQ ID NO: 87869 - DNA, 40 bp, Homo sapiens
ctttcacctcaccatgccatctcacttcatttattttaaa

SEQ ID NO: 87870 - DNA, 40 bp, Homo sapiens
ttaaaataaatgaagtgagatggcatggtgaggtgaaagt

SEQ ID NO: 87871 - DNA, 40 bp, Homo sapiens
actttcacctcaccatgccatctcacttcatttattttaa

SEQ ID NO: 87872 - DNA, 40 bp, Homo sapiens
taaaataaatgaagtgagatggcatggtgaggtgaaagta

SEQ ID NO: 87873 - DNA, 40 bp, Homo sapiens
tactttcacctcaccatgccatctcacttcatttatttta

SEQ ID NO: 87874 - DNA, 40 bp, Homo sapiens
aaaataaatgaagtgagatggcatggtgaggtgaaagtat

SEQ ID NO: 87875 - DNA, 40 bp, Homo sapiens
atactttcacctcaccatgccatctcacttcatttatttt

SEQ ID NO: 87876 - DNA, 40 bp, Homo sapiens
aaataaatgaagtgagatggcatggtgaggtgaaagtatc

SEQ ID NO: 87877 - DNA, 40 bp, Homo sapiens
gatactttcacctcaccatgccatctcacttcatttattt

SEQ ID NO: 87878 - DNA, 40 bp, Homo sapiens
aataaatgaagtgagatggcatggtgaggtgaaagtatca

SEQ ID NO: 87879 - DNA, 40 bp, Homo sapiens
tgatactttcacctcaccatgccatctcacttcatttatt

SEQ ID NO: 87880 - DNA, 40 bp, Homo sapiens
ataaatgaagtgagatggcatggtgaggtgaaagtatcac

SEQ ID NO: 87881 - DNA, 40 bp, Homo sapiens
gtgatactttcacctcaccatgccatctcacttcatttat

SEQ ID NO: 87882 - DNA, 40 bp, Homo sapiens
taaatgaagtgagatggcatggtgaggtgaaagtatcact

SEQ ID NO: 87883 - DNA, 40 bp, Homo sapiens
agtgatactttcacctcaccatgccatctcacttcattta

SEQ ID NO: 87884 - DNA, 40 bp, Homo sapiens
aaatgaagtgagatggcatggtgaggtgaaagtatcactg

SEQ ID NO: 87885 - DNA, 40 bp, Homo sapiens
cagtgatactttcacctcaccatgccatctcacttcattt

SEQ ID NO: 87886 - DNA, 40 bp, Homo sapiens
aatgaagtgagatggcatggtgaggtgaaagtatcactgg

SEQ ID NO: 87887 - DNA, 40 bp, Homo sapiens
ccagtgatactttcacctcaccatgccatctcacttcatt

SEQ ID NO: 87888 - DNA, 40 bp, Homo sapiens
atgaagtgagatggcatggtgaggtgaaagtatcactgga

SEQ ID NO: 87889 - DNA, 40 bp, Homo sapiens
tccagtgatactttcacctcaccatgccatctcacttcat

SEQ ID NO: 87890 - DNA, 40 bp, Homo sapiens
tgaagtgagatggcatggtgaggtgaaagtatcactggac

SEQ ID NO: 87891 - DNA, 40 bp, Homo sapiens
gtccagtgatactttcacctcaccatgccatctcacttca

SEQ ID NO: 87892 - DNA, 40 bp, Homo sapiens
gaagtgagatggcatggtgaggtgaaagtatcactggact

SEQ ID NO: 87893 - DNA, 40 bp, Homo sapiens
agtccagtgatactttcacctcaccatgccatctcacttc

SEQ ID NO: 87894 - DNA, 40 bp, Homo sapiens
aagtgagatggcatggtgaggtgaaagtatcactggacta

SEQ ID NO: 87895 - DNA, 40 bp, Homo sapiens
tagtccagtgatactttcacctcaccatgccatctcactt

SEQ ID NO: 87896 - DNA, 40 bp, Homo sapiens
agtgagatggcatggtgaggtgaaagtatcactggactag

SEQ ID NO: 87897 - DNA, 40 bp, Homo sapiens
ctagtccagtgatactttcacctcaccatgccatctcact

SEQ ID NO: 87898 - DNA, 40 bp, Homo sapiens
gtgagatggcatggtgaggtgaaagtatcactggactagg

SEQ ID NO: 87899 - DNA, 40 bp, Homo sapiens
cctagtccagtgatactttcacctcaccatgccatctcac

SEQ ID NO: 87900 - DNA, 40 bp, Homo sapiens
tgagatggcatggtgaggtgaaagtatcactggactagga

SEQ ID NO: 87901 - DNA, 40 bp, Homo sapiens
tcctagtccagtgatactttcacctcaccatgccatctca

SEQ ID NO: 87902 - DNA, 40 bp, Homo sapiens
gagatggcatggtgaggtgaaagtatcactggactaggaa

SEQ ID NO: 87903 - DNA, 40 bp, Homo sapiens
ttcctagtccagtgatactttcacctcaccatgccatctc

SEQ ID NO: 87904 - DNA, 40 bp, Homo sapiens
agatggcatggtgaggtgaaagtatcactggactaggaag

SEQ ID NO: 87905 - DNA, 40 bp, Homo sapiens
cttcctagtccagtgatactttcacctcaccatgccatct

SEQ ID NO: 87906 - DNA, 40 bp, Homo sapiens
gatggcatggtgaggtgaaagtatcactggactaggaaga

SEQ ID NO: 87907 - DNA, 40 bp, Homo sapiens
tcttcctagtccagtgatactttcacctcaccatgccatc

SEQ ID NO: 87908 - DNA, 40 bp, Homo sapiens
atggcatggtgaggtgaaagtatcactggactaggaagaa

SEQ ID NO: 87909 - DNA, 40 bp, Homo sapiens
ttcttcctagtccagtgatactttcacctcaccatgccat

SEQ ID NO: 87910 - DNA, 40 bp, Homo sapiens
tggcatggtgaggtgaaagtatcactggactaggaagaag

SEQ ID NO: 87911 - DNA, 40 bp, Homo sapiens
cttcttcctagtccagtgatactttcacctcaccatgcca

SEQ ID NO: 87912 - DNA, 40 bp, Homo sapiens
ggcatggtgaggtgaaagtatcactggactaggaagaagg

SEQ ID NO: 87913 - DNA, 40 bp, Homo sapiens
ccttcttcctagtccagtgatactttcacctcaccatgcc

SEQ ID NO: 87914 - DNA, 40 bp, Homo sapiens
gcatggtgaggtgaaagtatcactggactaggaagaaggt

SEQ ID NO: 87915 - DNA, 40 bp, Homo sapiens
accttcttcctagtccagtgatactttcacctcaccatgc

SEQ ID NO: 87916 - DNA, 40 bp, Homo sapiens
catggtgaggtgaaagtatcactggactaggaagaaggtg

SEQ ID NO: 87917 - DNA, 40 bp, Homo sapiens
caccttcttcctagtccagtgatactttcacctcaccatg

SEQ ID NO: 87918 - DNA, 40 bp, Homo sapiens
atggtgaggtgaaagtatcactggactaggaagaaggtga

SEQ ID NO: 87919 - DNA, 40 bp, Homo sapiens
tcaccttcttcctagtccagtgatactttcacctcaccat

SEQ ID NO: 87920 - DNA, 40 bp, Homo sapiens
tggtgaggtgaaagtatcactggactaggaagaaggtgac

SEQ ID NO: 87921 - DNA, 40 bp, Homo sapiens
gtcaccttcttcctagtccagtgatactttcacctcacca

SEQ ID NO: 87922 - DNA, 40 bp, Homo sapiens
ggtgaggtgaaagtatcactggactaggaagaaggtgact

SEQ ID NO: 87923 - DNA, 40 bp, Homo sapiens
agtcaccttcttcctagtccagtgatactttcacctcacc

SEQ ID NO: 87924 - DNA, 40 bp, Homo sapiens
gtgaggtgaaagtatcactggactaggaagaaggtgactt

SEQ ID NO: 87925 - DNA, 40 bp, Homo sapiens
aagtcaccttcttcctagtccagtgatactttcacctcac

SEQ ID NO: 87926 - DNA, 40 bp, Homo sapiens
tgaggtgaaagtatcactggactaggaagaaggtgactta

SEQ ID NO: 87927 - DNA, 40 bp, Homo sapiens
taagtcaccttcttcctagtccagtgatactttcacctca

SEQ ID NO: 87928 - DNA, 40 bp, Homo sapiens
gaggtgaaagtatcactggactaggaagaaggtgacttag

SEQ ID NO: 87929 - DNA, 40 bp, Homo sapiens
ctaagtcaccttcttcctagtccagtgatactttcacctc

SEQ ID NO: 87930 - DNA, 40 bp, Homo sapiens
aggtgaaagtatcactggactaggaagaaggtgacttagg

SEQ ID NO: 87931 - DNA, 40 bp, Homo sapiens
cctaagtcaccttcttcctagtccagtgatactttcacct

SEQ ID NO: 87932 - DNA, 40 bp, Homo sapiens
ggtgaaagtatcactggactaggaagaaggtgacttaggt

SEQ ID NO: 87933 - DNA, 40 bp, Homo sapiens
acctaagtcaccttcttcctagtccagtgatactttcacc

SEQ ID NO: 87934 - DNA, 40 bp, Homo sapiens
gtgaaagtatcactggactaggaagaaggtgacttaggtt

SEQ ID NO: 87935 - DNA, 40 bp, Homo sapiens
aacctaagtcaccttcttcctagtccagtgatactttcac

SEQ ID NO: 87936 - DNA, 40 bp, Homo sapiens
tgaaagtatcactggactaggaagaaggtgacttaggttc

SEQ ID NO: 87937 - DNA, 40 bp, Homo sapiens
gaacctaagtcaccttcttcctagtccagtgatactttca

SEQ ID NO: 87938 - DNA, 40 bp, Homo sapiens
gaaagtatcactggactaggaagaaggtgacttaggttct

SEQ ID NO: 87939 - DNA, 40 bp, Homo sapiens
agaacctaagtcaccttcttcctagtccagtgatactttc

SEQ ID NO: 87940 - DNA, 40 bp, Homo sapiens
aaagtatcactggactaggaagaaggtgacttaggttcta

SEQ ID NO: 87941 - DNA, 40 bp, Homo sapiens
tagaacctaagtcaccttcttcctagtccagtgatacttt

SEQ ID NO: 87942 - DNA, 40 bp, Homo sapiens
aagtatcactggactaggaagaaggtgacttaggttctag

SEQ ID NO: 87943 - DNA, 40 bp, Homo sapiens
ctagaacctaagtcaccttcttcctagtccagtgatactt

SEQ ID NO: 87944 - DNA, 40 bp, Homo sapiens
agtatcactggactaggaagaaggtgacttaggttctaga

SEQ ID NO: 87945 - DNA, 40 bp, Homo sapiens
tctagaacctaagtcaccttcttcctagtccagtgatact

SEQ ID NO: 87946 - DNA, 40 bp, Homo sapiens
gtatcactggactaggaagaaggtgacttaggttctagat

SEQ ID NO: 87947 - DNA, 40 bp, Homo sapiens
atctagaacctaagtcaccttcttcctagtccagtgatac

SEQ ID NO: 87948 - DNA, 40 bp, Homo sapiens
tatcactggactaggaagaaggtgacttaggttctagata

SEQ ID NO: 87949 - DNA, 40 bp, Homo sapiens
tatctagaacctaagtcaccttcttcctagtccagtgata

SEQ ID NO: 87950 - DNA, 40 bp, Homo sapiens
atcactggactaggaagaaggtgacttaggttctagatag

SEQ ID NO: 87951 - DNA, 40 bp, Homo sapiens
ctatctagaacctaagtcaccttcttcctagtccagtgat

SEQ ID NO: 87952 - DNA, 40 bp, Homo sapiens
tcactggactaggaagaaggtgacttaggttctagatagg

SEQ ID NO: 87953 - DNA, 40 bp, Homo sapiens
cctatctagaacctaagtcaccttcttcctagtccagtga

SEQ ID NO: 87954 - DNA, 40 bp, Homo sapiens
cactggactaggaagaaggtgacttaggttctagataggt

SEQ ID NO: 87955 - DNA, 40 bp, Homo sapiens
acctatctagaacctaagtcaccttcttcctagtccagtg

SEQ ID NO: 87956 - DNA, 40 bp, Homo sapiens
actggactaggaagaaggtgacttaggttctagataggtg

SEQ ID NO: 87957 - DNA, 40 bp, Homo sapiens
cacctatctagaacctaagtcaccttcttcctagtccagt

SEQ ID NO: 87958 - DNA, 40 bp, Homo sapiens
ctggactaggaagaaggtgacttaggttctagataggtgt

SEQ ID NO: 87959 - DNA, 40 bp, Homo sapiens
acacctatctagaacctaagtcaccttcttcctagtccag

SEQ ID NO: 87960 - DNA, 40 bp, Homo sapiens
tggactaggaagaaggtgacttaggttctagataggtgtc

SEQ ID NO: 87961 - DNA, 40 bp, Homo sapiens
gacacctatctagaacctaagtcaccttcttcctagtcca

SEQ ID NO: 87962 - DNA, 40 bp, Homo sapiens
ggactaggaagaaggtgacttaggttctagataggtgtct

SEQ ID NO: 87963 - DNA, 40 bp, Homo sapiens
agacacctatctagaacctaagtcaccttcttcctagtcc

SEQ ID NO: 87964 - DNA, 40 bp, Homo sapiens
gactaggaagaaggtgacttaggttctagataggtgtctt

SEQ ID NO: 87965 - DNA, 40 bp, Homo sapiens
aagacacctatctagaacctaagtcaccttcttcctagtc

SEQ ID NO: 87966 - DNA, 40 bp, Homo sapiens
actaggaagaaggtgacttaggttctagataggtgtcttt

SEQ ID NO: 87967 - DNA, 40 bp, Homo sapiens
aaagacacctatctagaacctaagtcaccttcttcctagt

SEQ ID NO: 87968 - DNA, 40 bp, Homo sapiens
ctaggaagaaggtgacttaggttctagataggtgtctttt

SEQ ID NO: 87969 - DNA, 40 bp, Homo sapiens
aaaagacacctatctagaacctaagtcaccttcttcctag

SEQ ID NO: 87970 - DNA, 40 bp, Homo sapiens
taggaagaaggtgacttaggttctagataggtgtctttta

SEQ ID NO: 87971 - DNA, 40 bp, Homo sapiens
taaaagacacctatctagaacctaagtcaccttcttccta

SEQ ID NO: 87972 - DNA, 40 bp, Homo sapiens
aggaagaaggtgacttaggttctagataggtgtcttttag

SEQ ID NO: 87973 - DNA, 40 bp, Homo sapiens
ctaaaagacacctatctagaacctaagtcaccttcttcct

SEQ ID NO: 87974 - DNA, 40 bp, Homo sapiens
ggaagaaggtgacttaggttctagataggtgtcttttagg

SEQ ID NO: 87975 - DNA, 40 bp, Homo sapiens
cctaaaagacacctatctagaacctaagtcaccttcttcc

SEQ ID NO: 87976 - DNA, 40 bp, Homo sapiens
gaagaaggtgacttaggttctagataggtgtcttttagga

SEQ ID NO: 87977 - DNA, 40 bp, Homo sapiens
tcctaaaagacacctatctagaacctaagtcaccttcttc

SEQ ID NO: 87978 - DNA, 40 bp, Homo sapiens
aagaaggtgacttaggttctagataggtgtcttttaggac

SEQ ID NO: 87979 - DNA, 40 bp, Homo sapiens
gtcctaaaagacacctatctagaacctaagtcaccttctt

SEQ ID NO: 87980 - DNA, 40 bp, Homo sapiens
agaaggtgacttaggttctagataggtgtcttttaggact

SEQ ID NO: 87981 - DNA, 40 bp, Homo sapiens
agtcctaaaagacacctatctagaacctaagtcaccttct

SEQ ID NO: 87982 - DNA, 40 bp, Homo sapiens
gaaggtgacttaggttctagataggtgtcttttaggactc

SEQ ID NO: 87983 - DNA, 40 bp, Homo sapiens
gagtcctaaaagacacctatctagaacctaagtcaccttc

SEQ ID NO: 87984 - DNA, 40 bp, Homo sapiens
aaggtgacttaggttctagataggtgtcttttaggactct

SEQ ID NO: 87985 - DNA, 40 bp, Homo sapiens
agagtcctaaaagacacctatctagaacctaagtcacctt

SEQ ID NO: 87986 - DNA, 40 bp, Homo sapiens
aggtgacttaggttctagataggtgtcttttaggactctg

SEQ ID NO: 87987 - DNA, 40 bp, Homo sapiens
cagagtcctaaaagacacctatctagaacctaagtcacct

SEQ ID NO: 87988 - DNA, 40 bp, Homo sapiens
ggtgacttaggttctagataggtgtcttttaggactctga

SEQ ID NO: 87989 - DNA, 40 bp, Homo sapiens
tcagagtcctaaaagacacctatctagaacctaagtcacc

SEQ ID NO: 87990 - DNA, 40 bp, Homo sapiens
gtgacttaggttctagataggtgtcttttaggactctgat

SEQ ID NO: 87991 - DNA, 40 bp, Homo sapiens
atcagagtcctaaaagacacctatctagaacctaagtcac

SEQ ID NO: 87992 - DNA, 40 bp, Homo sapiens
tgacttaggttctagataggtgtcttttaggactctgatt

SEQ ID NO: 87993 - DNA, 40 bp, Homo sapiens
aatcagagtcctaaaagacacctatctagaacctaagtca

SEQ ID NO: 87994 - DNA, 40 bp, Homo sapiens
gacttaggttctagataggtgtcttttaggactctgattt

SEQ ID NO: 87995 - DNA, 40 bp, Homo sapiens
aaatcagagtcctaaaagacacctatctagaacctaagtc

SEQ ID NO: 87996 - DNA, 40 bp, Homo sapiens
acttaggttctagataggtgtcttttaggactctgatttt

SEQ ID NO: 87997 - DNA, 40 bp, Homo sapiens
aaaatcagagtcctaaaagacacctatctagaacctaagt

SEQ ID NO: 87998 - DNA, 40 bp, Homo sapiens
cttaggttctagataggtgtcttttaggactctgattttg

SEQ ID NO: 87999 - DNA, 40 bp, Homo sapiens
caaaatcagagtcctaaaagacacctatctagaacctaag

SEQ ID NO: 88000 - DNA, 40 bp, Homo sapiens
ttaggttctagataggtgtcttttaggactctgattttga

SEQ ID NO: 88001 - DNA, 40 bp, Homo sapiens
tcaaaatcagagtcctaaaagacacctatctagaacctaa

SEQ ID NO: 88002 - DNA, 40 bp, Homo sapiens
taggttctagataggtgtcttttaggactctgattttgag

SEQ ID NO: 88003 - DNA, 40 bp, Homo sapiens
ctcaaaatcagagtcctaaaagacacctatctagaaccta

SEQ ID NO: 88004 - DNA, 40 bp, Homo sapiens
aggttctagataggtgtcttttaggactctgattttgagg

SEQ ID NO: 88005 - DNA, 40 bp, Homo sapiens
cctcaaaatcagagtcctaaaagacacctatctagaacct

SEQ ID NO: 88006 - DNA, 40 bp, Homo sapiens
ggttctagataggtgtcttttaggactctgattttgagga

SEQ ID NO: 88007 - DNA, 40 bp, Homo sapiens
tcctcaaaatcagagtcctaaaagacacctatctagaacc

SEQ ID NO: 88008 - DNA, 40 bp, Homo sapiens
gttctagataggtgtcttttaggactctgattttgaggac

SEQ ID NO: 88009 - DNA, 40 bp, Homo sapiens
gtcctcaaaatcagagtcctaaaagacacctatctagaac

SEQ ID NO: 88010 - DNA, 40 bp, Homo sapiens
ttctagataggtgtcttttaggactctgattttgaggaca

SEQ ID NO: 88011 - DNA, 40 bp, Homo sapiens
tgtcctcaaaatcagagtcctaaaagacacctatctagaa

SEQ ID NO: 88012 - DNA, 40 bp, Homo sapiens
tctagataggtgtcttttaggactctgattttgaggacat

SEQ ID NO: 88013 - DNA, 40 bp, Homo sapiens
atgtcctcaaaatcagagtcctaaaagacacctatctaga

SEQ ID NO: 88014 - DNA, 40 bp, Homo sapiens
ctagataggtgtcttttaggactctgattttgaggacatc

SEQ ID NO: 88015 - DNA, 40 bp, Homo sapiens
gatgtcctcaaaatcagagtcctaaaagacacctatctag

SEQ ID NO: 88016 - DNA, 40 bp, Homo sapiens
tagataggtgtcttttaggactctgattttgaggacatca

SEQ ID NO: 88017 - DNA, 40 bp, Homo sapiens
tgatgtcctcaaaatcagagtcctaaaagacacctatcta

SEQ ID NO: 88018 - DNA, 40 bp, Homo sapiens
agataggtgtcttttaggactctgattttgaggacatcac

SEQ ID NO: 88019 - DNA, 40 bp, Homo sapiens
gtgatgtcctcaaaatcagagtcctaaaagacacctatct

SEQ ID NO: 88020 - DNA, 40 bp, Homo sapiens
gataggtgtcttttaggactctgattttgaggacatcact

SEQ ID NO: 88021 - DNA, 40 bp, Homo sapiens
agtgatgtcctcaaaatcagagtcctaaaagacacctatc

SEQ ID NO: 88022 - DNA, 40 bp, Homo sapiens
ataggtgtcttttaggactctgattttgaggacatcactt

SEQ ID NO: 88023 - DNA, 40 bp, Homo sapiens
aagtgatgtcctcaaaatcagagtcctaaaagacacctat

SEQ ID NO: 88024 - DNA, 40 bp, Homo sapiens
taggtgtcttttaggactctgattttgaggacatcactta

SEQ ID NO: 88025 - DNA, 40 bp, Homo sapiens
taagtgatgtcctcaaaatcagagtcctaaaagacaccta

SEQ ID NO: 88026 - DNA, 40 bp, Homo sapiens
aggtgtcttttaggactctgattttgaggacatcacttac

SEQ ID NO: 88027 - DNA, 40 bp, Homo sapiens
gtaagtgatgtcctcaaaatcagagtcctaaaagacacct

SEQ ID NO: 88028 - DNA, 40 bp, Homo sapiens
ggtgtcttttaggactctgattttgaggacatcacttact

SEQ ID NO: 88029 - DNA, 40 bp, Homo sapiens
agtaagtgatgtcctcaaaatcagagtcctaaaagacacc

SEQ ID NO: 88030 - DNA, 40 bp, Homo sapiens
gtgtcttttaggactctgattttgaggacatcacttacta

SEQ ID NO: 88031 - DNA, 40 bp, Homo sapiens
tagtaagtgatgtcctcaaaatcagagtcctaaaagacac

SEQ ID NO: 88032 - DNA, 40 bp, Homo sapiens
tgtcttttaggactctgattttgaggacatcacttactat

SEQ ID NO: 88033 - DNA, 40 bp, Homo sapiens
atagtaagtgatgtcctcaaaatcagagtcctaaaagaca

SEQ ID NO: 88034 - DNA, 40 bp, Homo sapiens
gtcttttaggactctgattttgaggacatcacttactatc

SEQ ID NO: 88035 - DNA, 40 bp, Homo sapiens
gatagtaagtgatgtcctcaaaatcagagtcctaaaagac

SEQ ID NO: 88036 - DNA, 40 bp, Homo sapiens
tcttttaggactctgattttgaggacatcacttactatcc

SEQ ID NO: 88037 - DNA, 40 bp, Homo sapiens
ggatagtaagtgatgtcctcaaaatcagagtcctaaaaga

SEQ ID NO: 88038 - DNA, 40 bp, Homo sapiens
cttttaggactctgattttgaggacatcacttactatcca

SEQ ID NO: 88039 - DNA, 40 bp, Homo sapiens
tggatagtaagtgatgtcctcaaaatcagagtcctaaaag

SEQ ID NO: 88040 - DNA, 40 bp, Homo sapiens
ttttaggactctgattttgaggacatcacttactatccat

SEQ ID NO: 88041 - DNA, 40 bp, Homo sapiens
atggatagtaagtgatgtcctcaaaatcagagtcctaaaa

SEQ ID NO: 88042 - DNA, 40 bp, Homo sapiens
tttaggactctgattttgaggacatcacttactatccatt

SEQ ID NO: 88043 - DNA, 40 bp, Homo sapiens
aatggatagtaagtgatgtcctcaaaatcagagtcctaaa

SEQ ID NO: 88044 - DNA, 40 bp, Homo sapiens
ttaggactctgattttgaggacatcacttactatccattt

SEQ ID NO: 88045 - DNA, 40 bp, Homo sapiens
aaatggatagtaagtgatgtcctcaaaatcagagtcctaa

SEQ ID NO: 88046 - DNA, 40 bp, Homo sapiens
taggactctgattttgaggacatcacttactatccatttc

SEQ ID NO: 88047 - DNA, 40 bp, Homo sapiens
gaaatggatagtaagtgatgtcctcaaaatcagagtccta

SEQ ID NO: 88048 - DNA, 40 bp, Homo sapiens
aggactctgattttgaggacatcacttactatccatttct

SEQ ID NO: 88049 - DNA, 40 bp, Homo sapiens
agaaatggatagtaagtgatgtcctcaaaatcagagtcct

SEQ ID NO: 88050 - DNA, 40 bp, Homo sapiens
ggactctgattttgaggacatcacttactatccatttctt

SEQ ID NO: 88051 - DNA, 40 bp, Homo sapiens
aagaaatggatagtaagtgatgtcctcaaaatcagagtcc

SEQ ID NO: 88052 - DNA, 40 bp, Homo sapiens
gactctgattttgaggacatcacttactatccatttcttc

SEQ ID NO: 88053 - DNA, 40 bp, Homo sapiens
gaagaaatggatagtaagtgatgtcctcaaaatcagagtc

SEQ ID NO: 88054 - DNA, 40 bp, Homo sapiens
actctgattttgaggacatcacttactatccatttcttca

SEQ ID NO: 88055 - DNA, 40 bp, Homo sapiens
tgaagaaatggatagtaagtgatgtcctcaaaatcagagt

SEQ ID NO: 88056 - DNA, 40 bp, Homo sapiens
ctctgattttgaggacatcacttactatccatttcttcat

SEQ ID NO: 88057 - DNA, 40 bp, Homo sapiens
atgaagaaatggatagtaagtgatgtcctcaaaatcagag

SEQ ID NO: 88058 - DNA, 40 bp, Homo sapiens
tctgattttgaggacatcacttactatccatttcttcatg

SEQ ID NO: 88059 - DNA, 40 bp, Homo sapiens
catgaagaaatggatagtaagtgatgtcctcaaaatcaga

SEQ ID NO: 88060 - DNA, 40 bp, Homo sapiens
ctgattttgaggacatcacttactatccatttcttcatgt

SEQ ID NO: 88061 - DNA, 40 bp, Homo sapiens
acatgaagaaatggatagtaagtgatgtcctcaaaatcag

SEQ ID NO: 88062 - DNA, 40 bp, Homo sapiens
tgattttgaggacatcacttactatccatttcttcatgtt

SEQ ID NO: 88063 - DNA, 40 bp, Homo sapiens
aacatgaagaaatggatagtaagtgatgtcctcaaaatca

SEQ ID NO: 88064 - DNA, 40 bp, Homo sapiens
gattttgaggacatcacttactatccatttcttcatgtta

SEQ ID NO: 88065 - DNA, 40 bp, Homo sapiens
taacatgaagaaatggatagtaagtgatgtcctcaaaatc

SEQ ID NO: 88066 - DNA, 40 bp, Homo sapiens
attttgaggacatcacttactatccatttcttcatgttaa

SEQ ID NO: 88067 - DNA, 40 bp, Homo sapiens
ttaacatgaagaaatggatagtaagtgatgtcctcaaaat

SEQ ID NO: 88068 - DNA, 40 bp, Homo sapiens
ttttgaggacatcacttactatccatttcttcatgttaaa

SEQ ID NO: 88069 - DNA, 40 bp, Homo sapiens
tttaacatgaagaaatggatagtaagtgatgtcctcaaaa

SEQ ID NO: 88070 - DNA, 40 bp, Homo sapiens
tttgaggacatcacttactatccatttcttcatgttaaaa

SEQ ID NO: 88071 - DNA, 40 bp, Homo sapiens
ttttaacatgaagaaatggatagtaagtgatgtcctcaaa

SEQ ID NO: 88072 - DNA, 40 bp, Homo sapiens
ttgaggacatcacttactatccatttcttcatgttaaaag

SEQ ID NO: 88073 - DNA, 40 bp, Homo sapiens
cttttaacatgaagaaatggatagtaagtgatgtcctcaa

SEQ ID NO: 88074 - DNA, 40 bp, Homo sapiens
tgaggacatcacttactatccatttcttcatgttaaaaga

SEQ ID NO: 88075 - DNA, 40 bp, Homo sapiens
tcttttaacatgaagaaatggatagtaagtgatgtcctca

SEQ ID NO: 88076 - DNA, 40 bp, Homo sapiens
gaggacatcacttactatccatttcttcatgttaaaagaa

SEQ ID NO: 88077 - DNA, 40 bp, Homo sapiens
ttcttttaacatgaagaaatggatagtaagtgatgtcctc

SEQ ID NO: 88078 - DNA, 40 bp, Homo sapiens
aggacatcacttactatccatttcttcatgttaaaagaag

SEQ ID NO: 88079 - DNA, 40 bp, Homo sapiens
cttcttttaacatgaagaaatggatagtaagtgatgtcct

SEQ ID NO: 88080 - DNA, 40 bp, Homo sapiens
ggacatcacttactatccatttcttcatgttaaaagaagt

SEQ ID NO: 88081 - DNA, 40 bp, Homo sapiens
acttcttttaacatgaagaaatggatagtaagtgatgtcc

SEQ ID NO: 88082 - DNA, 40 bp, Homo sapiens
gacatcacttactatccatttcttcatgttaaaagaagtc

SEQ ID NO: 88083 - DNA, 40 bp, Homo sapiens
gacttcttttaacatgaagaaatggatagtaagtgatgtc

SEQ ID NO: 88084 - DNA, 40 bp, Homo sapiens
acatcacttactatccatttcttcatgttaaaagaagtca

SEQ ID NO: 88085 - DNA, 40 bp, Homo sapiens
tgacttcttttaacatgaagaaatggatagtaagtgatgt

SEQ ID NO: 88086 - DNA, 40 bp, Homo sapiens
catcacttactatccatttcttcatgttaaaagaagtcat

SEQ ID NO: 88087 - DNA, 40 bp, Homo sapiens
atgacttcttttaacatgaagaaatggatagtaagtgatg

SEQ ID NO: 88088 - DNA, 40 bp, Homo sapiens
atcacttactatccatttcttcatgttaaaagaagtcatc

SEQ ID NO: 88089 - DNA, 40 bp, Homo sapiens
gatgacttcttttaacatgaagaaatggatagtaagtgat

SEQ ID NO: 88090 - DNA, 40 bp, Homo sapiens
tcacttactatccatttcttcatgttaaaagaagtcatct

SEQ ID NO: 88091 - DNA, 40 bp, Homo sapiens
agatgacttcttttaacatgaagaaatggatagtaagtga

SEQ ID NO: 88092 - DNA, 40 bp, Homo sapiens
cacttactatccatttcttcatgttaaaagaagtcatctc

SEQ ID NO: 88093 - DNA, 40 bp, Homo sapiens
gagatgacttcttttaacatgaagaaatggatagtaagtg

SEQ ID NO: 88094 - DNA, 40 bp, Homo sapiens
acttactatccatttcttcatgttaaaagaagtcatctca

SEQ ID NO: 88095 - DNA, 40 bp, Homo sapiens
tgagatgacttcttttaacatgaagaaatggatagtaagt

SEQ ID NO: 88096 - DNA, 40 bp, Homo sapiens
cttactatccatttcttcatgttaaaagaagtcatctcaa

SEQ ID NO: 88097 - DNA, 40 bp, Homo sapiens
ttgagatgacttcttttaacatgaagaaatggatagtaag

SEQ ID NO: 88098 - DNA, 40 bp, Homo sapiens
ttactatccatttcttcatgttaaaagaagtcatctcaaa

SEQ ID NO: 88099 - DNA, 40 bp, Homo sapiens
tttgagatgacttcttttaacatgaagaaatggatagtaa

SEQ ID NO: 88100 - DNA, 40 bp, Homo sapiens
tactatccatttcttcatgttaaaagaagtcatctcaaac

SEQ ID NO: 88101 - DNA, 40 bp, Homo sapiens
gtttgagatgacttcttttaacatgaagaaatggatagta

SEQ ID NO: 88102 - DNA, 40 bp, Homo sapiens
actatccatttcttcatgttaaaagaagtcatctcaaact

SEQ ID NO: 88103 - DNA, 40 bp, Homo sapiens
agtttgagatgacttcttttaacatgaagaaatggatagt

SEQ ID NO: 88104 - DNA, 40 bp, Homo sapiens
ctatccatttcttcatgttaaaagaagtcatctcaaactc

SEQ ID NO: 88105 - DNA, 40 bp, Homo sapiens
gagtttgagatgacttcttttaacatgaagaaatggatag

SEQ ID NO: 88106 - DNA, 40 bp, Homo sapiens
tatccatttcttcatgttaaaagaagtcatctcaaactct

SEQ ID NO: 88107 - DNA, 40 bp, Homo sapiens
agagtttgagatgacttcttttaacatgaagaaatggata

SEQ ID NO: 88108 - DNA, 40 bp, Homo sapiens
atccatttcttcatgttaaaagaagtcatctcaaactctt

SEQ ID NO: 88109 - DNA, 40 bp, Homo sapiens
aagagtttgagatgacttcttttaacatgaagaaatggat

SEQ ID NO: 88110 - DNA, 40 bp, Homo sapiens
tccatttcttcatgttaaaagaagtcatctcaaactctta

SEQ ID NO: 88111 - DNA, 40 bp, Homo sapiens
taagagtttgagatgacttcttttaacatgaagaaatgga

SEQ ID NO: 88112 - DNA, 40 bp, Homo sapiens
ccatttcttcatgttaaaagaagtcatctcaaactcttag

SEQ ID NO: 88113 - DNA, 40 bp, Homo sapiens
ctaagagtttgagatgacttcttttaacatgaagaaatgg

SEQ ID NO: 88114 - DNA, 40 bp, Homo sapiens
catttcttcatgttaaaagaagtcatctcaaactcttagt

SEQ ID NO: 88115 - DNA, 40 bp, Homo sapiens
actaagagtttgagatgacttcttttaacatgaagaaatg

SEQ ID NO: 88116 - DNA, 40 bp, Homo sapiens
atttcttcatgttaaaagaagtcatctcaaactcttagtt

SEQ ID NO: 88117 - DNA, 40 bp, Homo sapiens
aactaagagtttgagatgacttcttttaacatgaagaaat

SEQ ID NO: 88118 - DNA, 40 bp, Homo sapiens
tttcttcatgttaaaagaagtcatctcaaactcttagttt

SEQ ID NO: 88119 - DNA, 40 bp, Homo sapiens
aaactaagagtttgagatgacttcttttaacatgaagaaa

SEQ ID NO: 88120 - DNA, 40 bp, Homo sapiens
ttcttcatgttaaaagaagtcatctcaaactcttagtttt

SEQ ID NO: 88121 - DNA, 40 bp, Homo sapiens
aaaactaagagtttgagatgacttcttttaacatgaagaa

SEQ ID NO: 88122 - DNA, 40 bp, Homo sapiens
tcttcatgttaaaagaagtcatctcaaactcttagttttt

SEQ ID NO: 88123 - DNA, 40 bp, Homo sapiens
aaaaactaagagtttgagatgacttcttttaacatgaaga

SEQ ID NO: 88124 - DNA, 40 bp, Homo sapiens
cttcatgttaaaagaagtcatctcaaactcttagtttttt

SEQ ID NO: 88125 - DNA, 40 bp, Homo sapiens
aaaaaactaagagtttgagatgacttcttttaacatgaag

SEQ ID NO: 88126 - DNA, 40 bp, Homo sapiens
ttcatgttaaaagaagtcatctcaaactcttagttttttt

SEQ ID NO: 88127 - DNA, 40 bp, Homo sapiens
aaaaaaactaagagtttgagatgacttcttttaacatgaa

SEQ ID NO: 88128 - DNA, 40 bp, Homo sapiens
tcatgttaaaagaagtcatctcaaactcttagtttttttt

SEQ ID NO: 88129 - DNA, 40 bp, Homo sapiens
aaaaaaaactaagagtttgagatgacttcttttaacatga

SEQ ID NO: 88130 - DNA, 40 bp, Homo sapiens
catgttaaaagaagtcatctcaaactcttagttttttttt

SEQ ID NO: 88131 - DNA, 40 bp, Homo sapiens
aaaaaaaaactaagagtttgagatgacttcttttaacatg

SEQ ID NO: 88132 - DNA, 40 bp, Homo sapiens
atgttaaaagaagtcatctcaaactcttagtttttttttt

SEQ ID NO: 88133 - DNA, 40 bp, Homo sapiens
aaaaaaaaaactaagagtttgagatgacttcttttaacat

SEQ ID NO: 88134 - DNA, 40 bp, Homo sapiens
tgttaaaagaagtcatctcaaactcttagttttttttttt

SEQ ID NO: 88135 - DNA, 40 bp, Homo sapiens
aaaaaaaaaaactaagagtttgagatgacttcttttaaca

SEQ ID NO: 88136 - DNA, 40 bp, Homo sapiens
gttaaaagaagtcatctcaaactcttagtttttttttttt

SEQ ID NO: 88137 - DNA, 40 bp, Homo sapiens
aaaaaaaaaaaactaagagtttgagatgacttcttttaac

SEQ ID NO: 88138 - DNA, 40 bp, Homo sapiens
ttaaaagaagtcatctcaaactcttagtttttttttttta

SEQ ID NO: 88139 - DNA, 40 bp, Homo sapiens
taaaaaaaaaaaactaagagtttgagatgacttcttttaa

SEQ ID NO: 88140 - DNA, 40 bp, Homo sapiens
taaaagaagtcatctcaaactcttagttttttttttttac

SEQ ID NO: 88141 - DNA, 40 bp, Homo sapiens
gtaaaaaaaaaaaactaagagtttgagatgacttctttta

SEQ ID NO: 88142 - DNA, 40 bp, Homo sapiens
aaaagaagtcatctcaaactcttagttttttttttttaca

SEQ ID NO: 88143 - DNA, 40 bp, Homo sapiens
tgtaaaaaaaaaaaactaagagtttgagatgacttctttt

SEQ ID NO: 88144 - DNA, 40 bp, Homo sapiens
aaagaagtcatctcaaactcttagttttttttttttacaa

SEQ ID NO: 88145 - DNA, 40 bp, Homo sapiens
ttgtaaaaaaaaaaaactaagagtttgagatgacttcttt

SEQ ID NO: 88146 - DNA, 40 bp, Homo sapiens
aagaagtcatctcaaactcttagttttttttttttacaac

SEQ ID NO: 88147 - DNA, 40 bp, Homo sapiens
gttgtaaaaaaaaaaaactaagagtttgagatgacttctt

SEQ ID NO: 88148 - DNA, 40 bp, Homo sapiens
agaagtcatctcaaactcttagttttttttttttacaact

SEQ ID NO: 88149 - DNA, 40 bp, Homo sapiens
agttgtaaaaaaaaaaaactaagagtttgagatgacttct

SEQ ID NO: 88150 - DNA, 40 bp, Homo sapiens
gaagtcatctcaaactcttagttttttttttttacaacta

SEQ ID NO: 88151 - DNA, 40 bp, Homo sapiens
tagttgtaaaaaaaaaaaactaagagtttgagatgacttc

SEQ ID NO: 88152 - DNA, 40 bp, Homo sapiens
aagtcatctcaaactcttagttttttttttttacaactat

SEQ ID NO: 88153 - DNA, 40 bp, Homo sapiens
atagttgtaaaaaaaaaaaactaagagtttgagatgactt

SEQ ID NO: 88154 - DNA, 40 bp, Homo sapiens
agtcatctcaaactcttagttttttttttttacaactatg

SEQ ID NO: 88155 - DNA, 40 bp, Homo sapiens
catagttgtaaaaaaaaaaaactaagagtttgagatgact

SEQ ID NO: 88156 - DNA, 40 bp, Homo sapiens
gtcatctcaaactcttagttttttttttttacaactatgt

SEQ ID NO: 88157 - DNA, 40 bp, Homo sapiens
acatagttgtaaaaaaaaaaaactaagagtttgagatgac

SEQ ID NO: 88158 - DNA, 40 bp, Homo sapiens
tcatctcaaactcttagttttttttttttacaactatgta

SEQ ID NO: 88159 - DNA, 40 bp, Homo sapiens
tacatagttgtaaaaaaaaaaaactaagagtttgagatga

SEQ ID NO: 88160 - DNA, 40 bp, Homo sapiens
catctcaaactcttagttttttttttttacaactatgtaa

SEQ ID NO: 88161 - DNA, 40 bp, Homo sapiens
ttacatagttgtaaaaaaaaaaaactaagagtttgagatg

SEQ ID NO: 88162 - DNA, 40 bp, Homo sapiens
atctcaaactcttagttttttttttttacaactatgtaat

SEQ ID NO: 88163 - DNA, 40 bp, Homo sapiens
attacatagttgtaaaaaaaaaaaactaagagtttgagat

SEQ ID NO: 88164 - DNA, 40 bp, Homo sapiens
tctcaaactcttagttttttttttttacaactatgtaatt

SEQ ID NO: 88165 - DNA, 40 bp, Homo sapiens
aattacatagttgtaaaaaaaaaaaactaagagtttgaga

SEQ ID NO: 88166 - DNA, 40 bp, Homo sapiens
ctcaaactcttagttttttttttttacaactatgtaattt

SEQ ID NO: 88167 - DNA, 40 bp, Homo sapiens
aaattacatagttgtaaaaaaaaaaaactaagagtttgag

SEQ ID NO: 88168 - DNA, 40 bp, Homo sapiens
tcaaactcttagttttttttttttacaactatgtaattta

SEQ ID NO: 88169 - DNA, 40 bp, Homo sapiens
taaattacatagttgtaaaaaaaaaaaactaagagtttga

SEQ ID NO: 88170 - DNA, 40 bp, Homo sapiens
caaactcttagttttttttttttacaactatgtaatttat

SEQ ID NO: 88171 - DNA, 40 bp, Homo sapiens
ataaattacatagttgtaaaaaaaaaaaactaagagtttg

SEQ ID NO: 88172 - DNA, 40 bp, Homo sapiens
aaactcttagttttttttttttacaactatgtaatttata

SEQ ID NO: 88173 - DNA, 40 bp, Homo sapiens
tataaattacatagttgtaaaaaaaaaaaactaagagttt

SEQ ID NO: 88174 - DNA, 40 bp, Homo sapiens
aactcttagttttttttttttacaactatgtaatttatat

SEQ ID NO: 88175 - DNA, 40 bp, Homo sapiens
atataaattacatagttgtaaaaaaaaaaaactaagagtt

SEQ ID NO: 88176 - DNA, 40 bp, Homo sapiens
actcttagttttttttttttacaactatgtaatttatatt

SEQ ID NO: 88177 - DNA, 40 bp, Homo sapiens
aatataaattacatagttgtaaaaaaaaaaaactaagagt

SEQ ID NO: 88178 - DNA, 40 bp, Homo sapiens
ctcttagttttttttttttacaactatgtaatttatattc

SEQ ID NO: 88179 - DNA, 40 bp, Homo sapiens
gaatataaattacatagttgtaaaaaaaaaaaactaagag

SEQ ID NO: 88180 - DNA, 40 bp, Homo sapiens
tcttagttttttttttttacaactatgtaatttatattcc

SEQ ID NO: 88181 - DNA, 40 bp, Homo sapiens
ggaatataaattacatagttgtaaaaaaaaaaaactaaga

SEQ ID NO: 88182 - DNA, 40 bp, Homo sapiens
cttagttttttttttttacaactatgtaatttatattcca

SEQ ID NO: 88183 - DNA, 40 bp, Homo sapiens
tggaatataaattacatagttgtaaaaaaaaaaaactaag

SEQ ID NO: 88184 - DNA, 40 bp, Homo sapiens
ttagttttttttttttacaactatgtaatttatattccat

SEQ ID NO: 88185 - DNA, 40 bp, Homo sapiens
atggaatataaattacatagttgtaaaaaaaaaaaactaa

SEQ ID NO: 88186 - DNA, 40 bp, Homo sapiens
tagttttttttttttacaactatgtaatttatattccatt

SEQ ID NO: 88187 - DNA, 40 bp, Homo sapiens
aatggaatataaattacatagttgtaaaaaaaaaaaacta

SEQ ID NO: 88188 - DNA, 40 bp, Homo sapiens
agttttttttttttacaactatgtaatttatattccattt

SEQ ID NO: 88189 - DNA, 40 bp, Homo sapiens
aaatggaatataaattacatagttgtaaaaaaaaaaaact

SEQ ID NO: 88190 - DNA, 40 bp, Homo sapiens
gttttttttttttacaactatgtaatttatattccattta

SEQ ID NO: 88191 - DNA, 40 bp, Homo sapiens
taaatggaatataaattacatagttgtaaaaaaaaaaaac

SEQ ID NO: 88192 - DNA, 40 bp, Homo sapiens
ttttttttttttacaactatgtaatttatattccatttac

SEQ ID NO: 88193 - DNA, 40 bp, Homo sapiens
gtaaatggaatataaattacatagttgtaaaaaaaaaaaa

SEQ ID NO: 88194 - DNA, 40 bp, Homo sapiens
tttttttttttacaactatgtaatttatattccatttaca

SEQ ID NO: 88195 - DNA, 40 bp, Homo sapiens
tgtaaatggaatataaattacatagttgtaaaaaaaaaaa

SEQ ID NO: 88196 - DNA, 40 bp, Homo sapiens
ttttttttttacaactatgtaatttatattccatttacat

SEQ ID NO: 88197 - DNA, 40 bp, Homo sapiens
atgtaaatggaatataaattacatagttgtaaaaaaaaaa

SEQ ID NO: 88198 - DNA, 40 bp, Homo sapiens
tttttttttacaactatgtaatttatattccatttacata

SEQ ID NO: 88199 - DNA, 40 bp, Homo sapiens
tatgtaaatggaatataaattacatagttgtaaaaaaaaa

SEQ ID NO: 88200 - DNA, 40 bp, Homo sapiens
ttttttttacaactatgtaatttatattccatttacataa

SEQ ID NO: 88201 - DNA, 40 bp, Homo sapiens
ttatgtaaatggaatataaattacatagttgtaaaaaaaa

SEQ ID NO: 88202 - DNA, 40 bp, Homo sapiens
tttttttacaactatgtaatttatattccatttacataag

SEQ ID NO: 88203 - DNA, 40 bp, Homo sapiens
cttatgtaaatggaatataaattacatagttgtaaaaaaa

SEQ ID NO: 88204 - DNA, 40 bp, Homo sapiens
ttttttacaactatgtaatttatattccatttacataagg

SEQ ID NO: 88205 - DNA, 40 bp, Homo sapiens
ccttatgtaaatggaatataaattacatagttgtaaaaaa

SEQ ID NO: 88206 - DNA, 40 bp, Homo sapiens
tttttacaactatgtaatttatattccatttacataagga

SEQ ID NO: 88207 - DNA, 40 bp, Homo sapiens
tccttatgtaaatggaatataaattacatagttgtaaaaa

SEQ ID NO: 88208 - DNA, 40 bp, Homo sapiens
ttttacaactatgtaatttatattccatttacataaggat

SEQ ID NO: 88209 - DNA, 40 bp, Homo sapiens
atccttatgtaaatggaatataaattacatagttgtaaaa

SEQ ID NO: 88210 - DNA, 40 bp, Homo sapiens
tttacaactatgtaatttatattccatttacataaggata

SEQ ID NO: 88211 - DNA, 40 bp, Homo sapiens
tatccttatgtaaatggaatataaattacatagttgtaaa

SEQ ID NO: 88212 - DNA, 40 bp, Homo sapiens
ttacaactatgtaatttatattccatttacataaggatac

SEQ ID NO: 88213 - DNA, 40 bp, Homo sapiens
gtatccttatgtaaatggaatataaattacatagttgtaa

SEQ ID NO: 88214 - DNA, 40 bp, Homo sapiens
tacaactatgtaatttatattccatttacataaggataca

SEQ ID NO: 88215 - DNA, 40 bp, Homo sapiens
tgtatccttatgtaaatggaatataaattacatagttgta

SEQ ID NO: 88216 - DNA, 40 bp, Homo sapiens
acaactatgtaatttatattccatttacataaggatacac

SEQ ID NO: 88217 - DNA, 40 bp, Homo sapiens
gtgtatccttatgtaaatggaatataaattacatagttgt

SEQ ID NO: 88218 - DNA, 40 bp, Homo sapiens
caactatgtaatttatattccatttacataaggatacact

SEQ ID NO: 88219 - DNA, 40 bp, Homo sapiens
agtgtatccttatgtaaatggaatataaattacatagttg

SEQ ID NO: 88220 - DNA, 40 bp, Homo sapiens
aactatgtaatttatattccatttacataaggatacactt

SEQ ID NO: 88221 - DNA, 40 bp, Homo sapiens
aagtgtatccttatgtaaatggaatataaattacatagtt

SEQ ID NO: 88222 - DNA, 40 bp, Homo sapiens
actatgtaatttatattccatttacataaggatacactta

SEQ ID NO: 88223 - DNA, 40 bp, Homo sapiens
taagtgtatccttatgtaaatggaatataaattacatagt

SEQ ID NO: 88224 - DNA, 40 bp, Homo sapiens
ctatgtaatttatattccatttacataaggatacacttat

SEQ ID NO: 88225 - DNA, 40 bp, Homo sapiens
ataagtgtatccttatgtaaatggaatataaattacatag

SEQ ID NO: 88226 - DNA, 40 bp, Homo sapiens
tatgtaatttatattccatttacataaggatacacttatt

SEQ ID NO: 88227 - DNA, 40 bp, Homo sapiens
aataagtgtatccttatgtaaatggaatataaattacata

SEQ ID NO: 88228 - DNA, 40 bp, Homo sapiens
atgtaatttatattccatttacataaggatacacttattt

SEQ ID NO: 88229 - DNA, 40 bp, Homo sapiens
aaataagtgtatccttatgtaaatggaatataaattacat

SEQ ID NO: 88230 - DNA, 40 bp, Homo sapiens
tgtaatttatattccatttacataaggatacacttatttg

SEQ ID NO: 88231 - DNA, 40 bp, Homo sapiens
caaataagtgtatccttatgtaaatggaatataaattaca

SEQ ID NO: 88232 - DNA, 40 bp, Homo sapiens
gtaatttatattccatttacataaggatacacttatttgt

SEQ ID NO: 88233 - DNA, 40 bp, Homo sapiens
acaaataagtgtatccttatgtaaatggaatataaattac

SEQ ID NO: 88234 - DNA, 40 bp, Homo sapiens
taatttatattccatttacataaggatacacttatttgtc

SEQ ID NO: 88235 - DNA, 40 bp, Homo sapiens
gacaaataagtgtatccttatgtaaatggaatataaatta

SEQ ID NO: 88236 - DNA, 40 bp, Homo sapiens
aatttatattccatttacataaggatacacttatttgtca

SEQ ID NO: 88237 - DNA, 40 bp, Homo sapiens
tgacaaataagtgtatccttatgtaaatggaatataaatt

SEQ ID NO: 88238 - DNA, 40 bp, Homo sapiens
atttatattccatttacataaggatacacttatttgtcaa

SEQ ID NO: 88239 - DNA, 40 bp, Homo sapiens
ttgacaaataagtgtatccttatgtaaatggaatataaat

SEQ ID NO: 88240 - DNA, 40 bp, Homo sapiens
tttatattccatttacataaggatacacttatttgtcaag

SEQ ID NO: 88241 - DNA, 40 bp, Homo sapiens
cttgacaaataagtgtatccttatgtaaatggaatataaa

SEQ ID NO: 88242 - DNA, 40 bp, Homo sapiens
ttatattccatttacataaggatacacttatttgtcaagc

SEQ ID NO: 88243 - DNA, 40 bp, Homo sapiens
gcttgacaaataagtgtatccttatgtaaatggaatataa

SEQ ID NO: 88244 - DNA, 40 bp, Homo sapiens
tatattccatttacataaggatacacttatttgtcaagct

SEQ ID NO: 88245 - DNA, 40 bp, Homo sapiens
agcttgacaaataagtgtatccttatgtaaatggaatata

SEQ ID NO: 88246 - DNA, 40 bp, Homo sapiens
atattccatttacataaggatacacttatttgtcaagctc

SEQ ID NO: 88247 - DNA, 40 bp, Homo sapiens
gagcttgacaaataagtgtatccttatgtaaatggaatat

SEQ ID NO: 88248 - DNA, 40 bp, Homo sapiens
tattccatttacataaggatacacttatttgtcaagctca

SEQ ID NO: 88249 - DNA, 40 bp, Homo sapiens
tgagcttgacaaataagtgtatccttatgtaaatggaata

SEQ ID NO: 88250 - DNA, 40 bp, Homo sapiens
attccatttacataaggatacacttatttgtcaagctcag

SEQ ID NO: 88251 - DNA, 40 bp, Homo sapiens
ctgagcttgacaaataagtgtatccttatgtaaatggaat

SEQ ID NO: 88252 - DNA, 40 bp, Homo sapiens
ttccatttacataaggatacacttatttgtcaagctcagc

SEQ ID NO: 88253 - DNA, 40 bp, Homo sapiens
gctgagcttgacaaataagtgtatccttatgtaaatggaa

SEQ ID NO: 88254 - DNA, 40 bp, Homo sapiens
tccatttacataaggatacacttatttgtcaagctcagca

SEQ ID NO: 88255 - DNA, 40 bp, Homo sapiens
tgctgagcttgacaaataagtgtatccttatgtaaatgga

SEQ ID NO: 88256 - DNA, 40 bp, Homo sapiens
ccatttacataaggatacacttatttgtcaagctcagcac

SEQ ID NO: 88257 - DNA, 40 bp, Homo sapiens
gtgctgagcttgacaaataagtgtatccttatgtaaatgg

SEQ ID NO: 88258 - DNA, 40 bp, Homo sapiens
catttacataaggatacacttatttgtcaagctcagcaca

SEQ ID NO: 88259 - DNA, 40 bp, Homo sapiens
tgtgctgagcttgacaaataagtgtatccttatgtaaatg

SEQ ID NO: 88260 - DNA, 40 bp, Homo sapiens
atttacataaggatacacttatttgtcaagctcagcacaa

SEQ ID NO: 88261 - DNA, 40 bp, Homo sapiens
ttgtgctgagcttgacaaataagtgtatccttatgtaaat

SEQ ID NO: 88262 - DNA, 40 bp, Homo sapiens
tttacataaggatacacttatttgtcaagctcagcacaat

SEQ ID NO: 88263 - DNA, 40 bp, Homo sapiens
attgtgctgagcttgacaaataagtgtatccttatgtaaa

SEQ ID NO: 88264 - DNA, 40 bp, Homo sapiens
ttacataaggatacacttatttgtcaagctcagcacaatc

SEQ ID NO: 88265 - DNA, 40 bp, Homo sapiens
gattgtgctgagcttgacaaataagtgtatccttatgtaa

SEQ ID NO: 88266 - DNA, 40 bp, Homo sapiens
tacataaggatacacttatttgtcaagctcagcacaatct

SEQ ID NO: 88267 - DNA, 40 bp, Homo sapiens
agattgtgctgagcttgacaaataagtgtatccttatgta

SEQ ID NO: 88268 - DNA, 40 bp, Homo sapiens
acataaggatacacttatttgtcaagctcagcacaatctg

SEQ ID NO: 88269 - DNA, 40 bp, Homo sapiens
cagattgtgctgagcttgacaaataagtgtatccttatgt

SEQ ID NO: 88270 - DNA, 40 bp, Homo sapiens
cataaggatacacttatttgtcaagctcagcacaatctgt

SEQ ID NO: 88271 - DNA, 40 bp, Homo sapiens
acagattgtgctgagcttgacaaataagtgtatccttatg

SEQ ID NO: 88272 - DNA, 40 bp, Homo sapiens
ataaggatacacttatttgtcaagctcagcacaatctgta

SEQ ID NO: 88273 - DNA, 40 bp, Homo sapiens
tacagattgtgctgagcttgacaaataagtgtatccttat

SEQ ID NO: 88274 - DNA, 40 bp, Homo sapiens
taaggatacacttatttgtcaagctcagcacaatctgtaa

SEQ ID NO: 88275 - DNA, 40 bp, Homo sapiens
ttacagattgtgctgagcttgacaaataagtgtatcctta

SEQ ID NO: 88276 - DNA, 40 bp, Homo sapiens
aaggatacacttatttgtcaagctcagcacaatctgtaaa

SEQ ID NO: 88277 - DNA, 40 bp, Homo sapiens
tttacagattgtgctgagcttgacaaataagtgtatcctt

SEQ ID NO: 88278 - DNA, 40 bp, Homo sapiens
aggatacacttatttgtcaagctcagcacaatctgtaaat

SEQ ID NO: 88279 - DNA, 40 bp, Homo sapiens
atttacagattgtgctgagcttgacaaataagtgtatcct

SEQ ID NO: 88280 - DNA, 40 bp, Homo sapiens
ggatacacttatttgtcaagctcagcacaatctgtaaatt

SEQ ID NO: 88281 - DNA, 40 bp, Homo sapiens
aatttacagattgtgctgagcttgacaaataagtgtatcc

SEQ ID NO: 88282 - DNA, 40 bp, Homo sapiens
gatacacttatttgtcaagctcagcacaatctgtaaattt

SEQ ID NO: 88283 - DNA, 40 bp, Homo sapiens
aaatttacagattgtgctgagcttgacaaataagtgtatc

SEQ ID NO: 88284 - DNA, 40 bp, Homo sapiens
atacacttatttgtcaagctcagcacaatctgtaaatttt

SEQ ID NO: 88285 - DNA, 40 bp, Homo sapiens
aaaatttacagattgtgctgagcttgacaaataagtgtat

SEQ ID NO: 88286 - DNA, 40 bp, Homo sapiens
tacacttatttgtcaagctcagcacaatctgtaaattttt

SEQ ID NO: 88287 - DNA, 40 bp, Homo sapiens
aaaaatttacagattgtgctgagcttgacaaataagtgta

SEQ ID NO: 88288 - DNA, 40 bp, Homo sapiens
acacttatttgtcaagctcagcacaatctgtaaattttta

SEQ ID NO: 88289 - DNA, 40 bp, Homo sapiens
taaaaatttacagattgtgctgagcttgacaaataagtgt

SEQ ID NO: 88290 - DNA, 40 bp, Homo sapiens
cacttatttgtcaagctcagcacaatctgtaaatttttaa

SEQ ID NO: 88291 - DNA, 40 bp, Homo sapiens
ttaaaaatttacagattgtgctgagcttgacaaataagtg

SEQ ID NO: 88292 - DNA, 40 bp, Homo sapiens
acttatttgtcaagctcagcacaatctgtaaatttttaac

SEQ ID NO: 88293 - DNA, 40 bp, Homo sapiens
gttaaaaatttacagattgtgctgagcttgacaaataagt

SEQ ID NO: 88294 - DNA, 40 bp, Homo sapiens
cttatttgtcaagctcagcacaatctgtaaatttttaacc

SEQ ID NO: 88295 - DNA, 40 bp, Homo sapiens
ggttaaaaatttacagattgtgctgagcttgacaaataag

SEQ ID NO: 88296 - DNA, 40 bp, Homo sapiens
ttatttgtcaagctcagcacaatctgtaaatttttaacct

SEQ ID NO: 88297 - DNA, 40 bp, Homo sapiens
aggttaaaaatttacagattgtgctgagcttgacaaataa

SEQ ID NO: 88298 - DNA, 40 bp, Homo sapiens
tatttgtcaagctcagcacaatctgtaaatttttaaccta

SEQ ID NO: 88299 - DNA, 40 bp, Homo sapiens
taggttaaaaatttacagattgtgctgagcttgacaaata

SEQ ID NO: 88300 - DNA, 40 bp, Homo sapiens
atttgtcaagctcagcacaatctgtaaatttttaacctat

SEQ ID NO: 88301 - DNA, 40 bp, Homo sapiens
ataggttaaaaatttacagattgtgctgagcttgacaaat

SEQ ID NO: 88302 - DNA, 40 bp, Homo sapiens
tttgtcaagctcagcacaatctgtaaatttttaacctatg

SEQ ID NO: 88303 - DNA, 40 bp, Homo sapiens
cataggttaaaaatttacagattgtgctgagcttgacaaa

SEQ ID NO: 88304 - DNA, 40 bp, Homo sapiens
ttgtcaagctcagcacaatctgtaaatttttaacctatgt

SEQ ID NO: 88305 - DNA, 40 bp, Homo sapiens
acataggttaaaaatttacagattgtgctgagcttgacaa

SEQ ID NO: 88306 - DNA, 40 bp, Homo sapiens
tgtcaagctcagcacaatctgtaaatttttaacctatgtt

SEQ ID NO: 88307 - DNA, 40 bp, Homo sapiens
aacataggttaaaaatttacagattgtgctgagcttgaca

SEQ ID NO: 88308 - DNA, 40 bp, Homo sapiens
gtcaagctcagcacaatctgtaaatttttaacctatgtta

SEQ ID NO: 88309 - DNA, 40 bp, Homo sapiens
taacataggttaaaaatttacagattgtgctgagcttgac

SEQ ID NO: 88310 - DNA, 40 bp, Homo sapiens
tcaagctcagcacaatctgtaaatttttaacctatgttac

SEQ ID NO: 88311 - DNA, 40 bp, Homo sapiens
gtaacataggttaaaaatttacagattgtgctgagcttga

SEQ ID NO: 88312 - DNA, 40 bp, Homo sapiens
caagctcagcacaatctgtaaatttttaacctatgttaca

SEQ ID NO: 88313 - DNA, 40 bp, Homo sapiens
tgtaacataggttaaaaatttacagattgtgctgagcttg

SEQ ID NO: 88314 - DNA, 40 bp, Homo sapiens
aagctcagcacaatctgtaaatttttaacctatgttacac

SEQ ID NO: 88315 - DNA, 40 bp, Homo sapiens
gtgtaacataggttaaaaatttacagattgtgctgagctt

SEQ ID NO: 88316 - DNA, 40 bp, Homo sapiens
agctcagcacaatctgtaaatttttaacctatgttacacc

SEQ ID NO: 88317 - DNA, 40 bp, Homo sapiens
ggtgtaacataggttaaaaatttacagattgtgctgagct

SEQ ID NO: 88318 - DNA, 40 bp, Homo sapiens
gctcagcacaatctgtaaatttttaacctatgttacacca

SEQ ID NO: 88319 - DNA, 40 bp, Homo sapiens
tggtgtaacataggttaaaaatttacagattgtgctgagc

SEQ ID NO: 88320 - DNA, 40 bp, Homo sapiens
ctcagcacaatctgtaaatttttaacctatgttacaccat

SEQ ID NO: 88321 - DNA, 40 bp, Homo sapiens
atggtgtaacataggttaaaaatttacagattgtgctgag

SEQ ID NO: 88322 - DNA, 40 bp, Homo sapiens
tcagcacaatctgtaaatttttaacctatgttacaccatc

SEQ ID NO: 88323 - DNA, 40 bp, Homo sapiens
gatggtgtaacataggttaaaaatttacagattgtgctga

SEQ ID NO: 88324 - DNA, 40 bp, Homo sapiens
cagcacaatctgtaaatttttaacctatgttacaccatct

SEQ ID NO: 88325 - DNA, 40 bp, Homo sapiens
agatggtgtaacataggttaaaaatttacagattgtgctg

SEQ ID NO: 88326 - DNA, 40 bp, Homo sapiens
agcacaatctgtaaatttttaacctatgttacaccatctt

SEQ ID NO: 88327 - DNA, 40 bp, Homo sapiens
aagatggtgtaacataggttaaaaatttacagattgtgct

SEQ ID NO: 88328 - DNA, 40 bp, Homo sapiens
gcacaatctgtaaatttttaacctatgttacaccatcttc

SEQ ID NO: 88329 - DNA, 40 bp, Homo sapiens
gaagatggtgtaacataggttaaaaatttacagattgtgc

SEQ ID NO: 88330 - DNA, 40 bp, Homo sapiens
cacaatctgtaaatttttaacctatgttacaccatcttca

SEQ ID NO: 88331 - DNA, 40 bp, Homo sapiens
tgaagatggtgtaacataggttaaaaatttacagattgtg

SEQ ID NO: 88332 - DNA, 40 bp, Homo sapiens
acaatctgtaaatttttaacctatgttacaccatcttcag

SEQ ID NO: 88333 - DNA, 40 bp, Homo sapiens
ctgaagatggtgtaacataggttaaaaatttacagattgt

SEQ ID NO: 88334 - DNA, 40 bp, Homo sapiens
caatctgtaaatttttaacctatgttacaccatcttcagt

SEQ ID NO: 88335 - DNA, 40 bp, Homo sapiens
actgaagatggtgtaacataggttaaaaatttacagattg

SEQ ID NO: 88336 - DNA, 40 bp, Homo sapiens
aatctgtaaatttttaacctatgttacaccatcttcagtg

SEQ ID NO: 88337 - DNA, 40 bp, Homo sapiens
cactgaagatggtgtaacataggttaaaaatttacagatt

SEQ ID NO: 88338 - DNA, 40 bp, Homo sapiens
atctgtaaatttttaacctatgttacaccatcttcagtgc

SEQ ID NO: 88339 - DNA, 40 bp, Homo sapiens
gcactgaagatggtgtaacataggttaaaaatttacagat

SEQ ID NO: 88340 - DNA, 40 bp, Homo sapiens
tctgtaaatttttaacctatgttacaccatcttcagtgcc

SEQ ID NO: 88341 - DNA, 40 bp, Homo sapiens
ggcactgaagatggtgtaacataggttaaaaatttacaga

SEQ ID NO: 88342 - DNA, 40 bp, Homo sapiens
ctgtaaatttttaacctatgttacaccatcttcagtgcca

SEQ ID NO: 88343 - DNA, 40 bp, Homo sapiens
tggcactgaagatggtgtaacataggttaaaaatttacag

SEQ ID NO: 88344 - DNA, 40 bp, Homo sapiens
tgtaaatttttaacctatgttacaccatcttcagtgccag

SEQ ID NO: 88345 - DNA, 40 bp, Homo sapiens
ctggcactgaagatggtgtaacataggttaaaaatttaca

SEQ ID NO: 88346 - DNA, 40 bp, Homo sapiens
gtaaatttttaacctatgttacaccatcttcagtgccagt

SEQ ID NO: 88347 - DNA, 40 bp, Homo sapiens
actggcactgaagatggtgtaacataggttaaaaatttac

SEQ ID NO: 88348 - DNA, 40 bp, Homo sapiens
taaatttttaacctatgttacaccatcttcagtgccagtc

SEQ ID NO: 88349 - DNA, 40 bp, Homo sapiens
gactggcactgaagatggtgtaacataggttaaaaattta

SEQ ID NO: 88350 - DNA, 40 bp, Homo sapiens
aaatttttaacctatgttacaccatcttcagtgccagtct

SEQ ID NO: 88351 - DNA, 40 bp, Homo sapiens
agactggcactgaagatggtgtaacataggttaaaaattt

SEQ ID NO: 88352 - DNA, 40 bp, Homo sapiens
aatttttaacctatgttacaccatcttcagtgccagtctt

SEQ ID NO: 88353 - DNA, 40 bp, Homo sapiens
aagactggcactgaagatggtgtaacataggttaaaaatt

SEQ ID NO: 88354 - DNA, 40 bp, Homo sapiens
atttttaacctatgttacaccatcttcagtgccagtcttg

SEQ ID NO: 88355 - DNA, 40 bp, Homo sapiens
caagactggcactgaagatggtgtaacataggttaaaaat

SEQ ID NO: 88356 - DNA, 40 bp, Homo sapiens
tttttaacctatgttacaccatcttcagtgccagtcttgg

SEQ ID NO: 88357 - DNA, 40 bp, Homo sapiens
ccaagactggcactgaagatggtgtaacataggttaaaaa

SEQ ID NO: 88358 - DNA, 40 bp, Homo sapiens
ttttaacctatgttacaccatcttcagtgccagtcttggg

SEQ ID NO: 88359 - DNA, 40 bp, Homo sapiens
cccaagactggcactgaagatggtgtaacataggttaaaa

SEQ ID NO: 88360 - DNA, 40 bp, Homo sapiens
tttaacctatgttacaccatcttcagtgccagtcttgggc

SEQ ID NO: 88361 - DNA, 40 bp, Homo sapiens
gcccaagactggcactgaagatggtgtaacataggttaaa

SEQ ID NO: 88362 - DNA, 40 bp, Homo sapiens
ttaacctatgttacaccatcttcagtgccagtcttgggca

SEQ ID NO: 88363 - DNA, 40 bp, Homo sapiens
tgcccaagactggcactgaagatggtgtaacataggttaa

SEQ ID NO: 88364 - DNA, 40 bp, Homo sapiens
taacctatgttacaccatcttcagtgccagtcttgggcaa

SEQ ID NO: 88365 - DNA, 40 bp, Homo sapiens
ttgcccaagactggcactgaagatggtgtaacataggtta

SEQ ID NO: 88366 - DNA, 40 bp, Homo sapiens
aacctatgttacaccatcttcagtgccagtcttgggcaaa

SEQ ID NO: 88367 - DNA, 40 bp, Homo sapiens
tttgcccaagactggcactgaagatggtgtaacataggtt

SEQ ID NO: 88368 - DNA, 40 bp, Homo sapiens
acctatgttacaccatcttcagtgccagtcttgggcaaaa

SEQ ID NO: 88369 - DNA, 40 bp, Homo sapiens
ttttgcccaagactggcactgaagatggtgtaacataggt

SEQ ID NO: 88370 - DNA, 40 bp, Homo sapiens
cctatgttacaccatcttcagtgccagtcttgggcaaaat

SEQ ID NO: 88371 - DNA, 40 bp, Homo sapiens
attttgcccaagactggcactgaagatggtgtaacatagg

SEQ ID NO: 88372 - DNA, 40 bp, Homo sapiens
ctatgttacaccatcttcagtgccagtcttgggcaaaatt

SEQ ID NO: 88373 - DNA, 40 bp, Homo sapiens
aattttgcccaagactggcactgaagatggtgtaacatag

SEQ ID NO: 88374 - DNA, 40 bp, Homo sapiens
tatgttacaccatcttcagtgccagtcttgggcaaaattg

SEQ ID NO: 88375 - DNA, 40 bp, Homo sapiens
caattttgcccaagactggcactgaagatggtgtaacata

SEQ ID NO: 88376 - DNA, 40 bp, Homo sapiens
atgttacaccatcttcagtgccagtcttgggcaaaattgt

SEQ ID NO: 88377 - DNA, 40 bp, Homo sapiens
acaattttgcccaagactggcactgaagatggtgtaacat

SEQ ID NO: 88378 - DNA, 40 bp, Homo sapiens
tgttacaccatcttcagtgccagtcttgggcaaaattgtg

SEQ ID NO: 88379 - DNA, 40 bp, Homo sapiens
cacaattttgcccaagactggcactgaagatggtgtaaca

SEQ ID NO: 88380 - DNA, 40 bp, Homo sapiens
gttacaccatcttcagtgccagtcttgggcaaaattgtgc

SEQ ID NO: 88381 - DNA, 40 bp, Homo sapiens
gcacaattttgcccaagactggcactgaagatggtgtaac

SEQ ID NO: 88382 - DNA, 40 bp, Homo sapiens
ttacaccatcttcagtgccagtcttgggcaaaattgtgca

SEQ ID NO: 88383 - DNA, 40 bp, Homo sapiens
tgcacaattttgcccaagactggcactgaagatggtgtaa

SEQ ID NO: 88384 - DNA, 40 bp, Homo sapiens
tacaccatcttcagtgccagtcttgggcaaaattgtgcaa

SEQ ID NO: 88385 - DNA, 40 bp, Homo sapiens
ttgcacaattttgcccaagactggcactgaagatggtgta

SEQ ID NO: 88386 - DNA, 40 bp, Homo sapiens
acaccatcttcagtgccagtcttgggcaaaattgtgcaag

SEQ ID NO: 88387 - DNA, 40 bp, Homo sapiens
cttgcacaattttgcccaagactggcactgaagatggtgt

SEQ ID NO: 88388 - DNA, 40 bp, Homo sapiens
caccatcttcagtgccagtcttgggcaaaattgtgcaaga

SEQ ID NO: 88389 - DNA, 40 bp, Homo sapiens
tcttgcacaattttgcccaagactggcactgaagatggtg

SEQ ID NO: 88390 - DNA, 40 bp, Homo sapiens
accatcttcagtgccagtcttgggcaaaattgtgcaagag

SEQ ID NO: 88391 - DNA, 40 bp, Homo sapiens
ctcttgcacaattttgcccaagactggcactgaagatggt

SEQ ID NO: 88392 - DNA, 40 bp, Homo sapiens
ccatcttcagtgccagtcttgggcaaaattgtgcaagagg

SEQ ID NO: 88393 - DNA, 40 bp, Homo sapiens
cctcttgcacaattttgcccaagactggcactgaagatgg

SEQ ID NO: 88394 - DNA, 40 bp, Homo sapiens
catcttcagtgccagtcttgggcaaaattgtgcaagaggt

SEQ ID NO: 88395 - DNA, 40 bp, Homo sapiens
acctcttgcacaattttgcccaagactggcactgaagatg

SEQ ID NO: 88396 - DNA, 40 bp, Homo sapiens
atcttcagtgccagtcttgggcaaaattgtgcaagaggtg

SEQ ID NO: 88397 - DNA, 40 bp, Homo sapiens
cacctcttgcacaattttgcccaagactggcactgaagat

SEQ ID NO: 88398 - DNA, 40 bp, Homo sapiens
tcttcagtgccagtcttgggcaaaattgtgcaagaggtga

SEQ ID NO: 88399 - DNA, 40 bp, Homo sapiens
tcacctcttgcacaattttgcccaagactggcactgaaga

SEQ ID NO: 88400 - DNA, 40 bp, Homo sapiens
cttcagtgccagtcttgggcaaaattgtgcaagaggtgaa

SEQ ID NO: 88401 - DNA, 40 bp, Homo sapiens
ttcacctcttgcacaattttgcccaagactggcactgaag

SEQ ID NO: 88402 - DNA, 40 bp, Homo sapiens
ttcagtgccagtcttgggcaaaattgtgcaagaggtgaag

SEQ ID NO: 88403 - DNA, 40 bp, Homo sapiens
cttcacctcttgcacaattttgcccaagactggcactgaa

SEQ ID NO: 88404 - DNA, 40 bp, Homo sapiens
tcagtgccagtcttgggcaaaattgtgcaagaggtgaagt

SEQ ID NO: 88405 - DNA, 40 bp, Homo sapiens
acttcacctcttgcacaattttgcccaagactggcactga

SEQ ID NO: 88406 - DNA, 40 bp, Homo sapiens
cagtgccagtcttgggcaaaattgtgcaagaggtgaagtt

SEQ ID NO: 88407 - DNA, 40 bp, Homo sapiens
aacttcacctcttgcacaattttgcccaagactggcactg

SEQ ID NO: 88408 - DNA, 40 bp, Homo sapiens
agtgccagtcttgggcaaaattgtgcaagaggtgaagttt

SEQ ID NO: 88409 - DNA, 40 bp, Homo sapiens
aaacttcacctcttgcacaattttgcccaagactggcact

SEQ ID NO: 88410 - DNA, 40 bp, Homo sapiens
gtgccagtcttgggcaaaattgtgcaagaggtgaagttta

SEQ ID NO: 88411 - DNA, 40 bp, Homo sapiens
taaacttcacctcttgcacaattttgcccaagactggcac

SEQ ID NO: 88412 - DNA, 40 bp, Homo sapiens
tgccagtcttgggcaaaattgtgcaagaggtgaagtttat

SEQ ID NO: 88413 - DNA, 40 bp, Homo sapiens
ataaacttcacctcttgcacaattttgcccaagactggca

SEQ ID NO: 88414 - DNA, 40 bp, Homo sapiens
gccagtcttgggcaaaattgtgcaagaggtgaagtttata

SEQ ID NO: 88415 - DNA, 40 bp, Homo sapiens
tataaacttcacctcttgcacaattttgcccaagactggc

SEQ ID NO: 88416 - DNA, 40 bp, Homo sapiens
ccagtcttgggcaaaattgtgcaagaggtgaagtttatat

SEQ ID NO: 88417 - DNA, 40 bp, Homo sapiens
atataaacttcacctcttgcacaattttgcccaagactgg

SEQ ID NO: 88418 - DNA, 40 bp, Homo sapiens
cagtcttgggcaaaattgtgcaagaggtgaagtttatatt

SEQ ID NO: 88419 - DNA, 40 bp, Homo sapiens
aatataaacttcacctcttgcacaattttgcccaagactg

SEQ ID NO: 88420 - DNA, 40 bp, Homo sapiens
agtcttgggcaaaattgtgcaagaggtgaagtttatattt

SEQ ID NO: 88421 - DNA, 40 bp, Homo sapiens
aaatataaacttcacctcttgcacaattttgcccaagact

SEQ ID NO: 88422 - DNA, 40 bp, Homo sapiens
gtcttgggcaaaattgtgcaagaggtgaagtttatatttg

SEQ ID NO: 88423 - DNA, 40 bp, Homo sapiens
caaatataaacttcacctcttgcacaattttgcccaagac

SEQ ID NO: 88424 - DNA, 40 bp, Homo sapiens
tcttgggcaaaattgtgcaagaggtgaagtttatatttga

SEQ ID NO: 88425 - DNA, 40 bp, Homo sapiens
tcaaatataaacttcacctcttgcacaattttgcccaaga

SEQ ID NO: 88426 - DNA, 40 bp, Homo sapiens
cttgggcaaaattgtgcaagaggtgaagtttatatttgaa

SEQ ID NO: 88427 - DNA, 40 bp, Homo sapiens
ttcaaatataaacttcacctcttgcacaattttgcccaag

SEQ ID NO: 88428 - DNA, 40 bp, Homo sapiens
ttgggcaaaattgtgcaagaggtgaagtttatatttgaat

SEQ ID NO: 88429 - DNA, 40 bp, Homo sapiens
attcaaatataaacttcacctcttgcacaattttgcccaa

SEQ ID NO: 88430 - DNA, 40 bp, Homo sapiens
tgggcaaaattgtgcaagaggtgaagtttatatttgaata

SEQ ID NO: 88431 - DNA, 40 bp, Homo sapiens
tattcaaatataaacttcacctcttgcacaattttgccca

SEQ ID NO: 88432 - DNA, 40 bp, Homo sapiens
gggcaaaattgtgcaagaggtgaagtttatatttgaatat

SEQ ID NO: 88433 - DNA, 40 bp, Homo sapiens
atattcaaatataaacttcacctcttgcacaattttgccc

SEQ ID NO: 88434 - DNA, 40 bp, Homo sapiens
ggcaaaattgtgcaagaggtgaagtttatatttgaatatc

SEQ ID NO: 88435 - DNA, 40 bp, Homo sapiens
gatattcaaatataaacttcacctcttgcacaattttgcc

SEQ ID NO: 88436 - DNA, 40 bp, Homo sapiens
gcaaaattgtgcaagaggtgaagtttatatttgaatatcc

SEQ ID NO: 88437 - DNA, 40 bp, Homo sapiens
ggatattcaaatataaacttcacctcttgcacaattttgc

SEQ ID NO: 88438 - DNA, 40 bp, Homo sapiens
caaaattgtgcaagaggtgaagtttatatttgaatatcca

SEQ ID NO: 88439 - DNA, 40 bp, Homo sapiens
tggatattcaaatataaacttcacctcttgcacaattttg

SEQ ID NO: 88440 - DNA, 40 bp, Homo sapiens
aaaattgtgcaagaggtgaagtttatatttgaatatccat

SEQ ID NO: 88441 - DNA, 40 bp, Homo sapiens
atggatattcaaatataaacttcacctcttgcacaatttt

SEQ ID NO: 88442 - DNA, 40 bp, Homo sapiens
aaattgtgcaagaggtgaagtttatatttgaatatccatt

SEQ ID NO: 88443 - DNA, 40 bp, Homo sapiens
aatggatattcaaatataaacttcacctcttgcacaattt

SEQ ID NO: 88444 - DNA, 40 bp, Homo sapiens
aattgtgcaagaggtgaagtttatatttgaatatccattc

SEQ ID NO: 88445 - DNA, 40 bp, Homo sapiens
gaatggatattcaaatataaacttcacctcttgcacaatt

SEQ ID NO: 88446 - DNA, 40 bp, Homo sapiens
attgtgcaagaggtgaagtttatatttgaatatccattct

SEQ ID NO: 88447 - DNA, 40 bp, Homo sapiens
agaatggatattcaaatataaacttcacctcttgcacaat

SEQ ID NO: 88448 - DNA, 40 bp, Homo sapiens
ttgtgcaagaggtgaagtttatatttgaatatccattctc

SEQ ID NO: 88449 - DNA, 40 bp, Homo sapiens
gagaatggatattcaaatataaacttcacctcttgcacaa

SEQ ID NO: 88450 - DNA, 40 bp, Homo sapiens
tgtgcaagaggtgaagtttatatttgaatatccattctcg

SEQ ID NO: 88451 - DNA, 40 bp, Homo sapiens
cgagaatggatattcaaatataaacttcacctcttgcaca

SEQ ID NO: 88452 - DNA, 40 bp, Homo sapiens
gtgcaagaggtgaagtttatatttgaatatccattctcgt

SEQ ID NO: 88453 - DNA, 40 bp, Homo sapiens
acgagaatggatattcaaatataaacttcacctcttgcac

SEQ ID NO: 88454 - DNA, 40 bp, Homo sapiens
tgcaagaggtgaagtttatatttgaatatccattctcgtt

SEQ ID NO: 88455 - DNA, 40 bp, Homo sapiens
aacgagaatggatattcaaatataaacttcacctcttgca

SEQ ID NO: 88456 - DNA, 40 bp, Homo sapiens
gcaagaggtgaagtttatatttgaatatccattctcgttt

SEQ ID NO: 88457 - DNA, 40 bp, Homo sapiens
aaacgagaatggatattcaaatataaacttcacctcttgc

SEQ ID NO: 88458 - DNA, 40 bp, Homo sapiens
caagaggtgaagtttatatttgaatatccattctcgtttt

SEQ ID NO: 88459 - DNA, 40 bp, Homo sapiens
aaaacgagaatggatattcaaatataaacttcacctcttg

SEQ ID NO: 88460 - DNA, 40 bp, Homo sapiens
aagaggtgaagtttatatttgaatatccattctcgtttta

SEQ ID NO: 88461 - DNA, 40 bp, Homo sapiens
taaaacgagaatggatattcaaatataaacttcacctctt

SEQ ID NO: 88462 - DNA, 40 bp, Homo sapiens
agaggtgaagtttatatttgaatatccattctcgttttag

SEQ ID NO: 88463 - DNA, 40 bp, Homo sapiens
ctaaaacgagaatggatattcaaatataaacttcacctct

SEQ ID NO: 88464 - DNA, 40 bp, Homo sapiens
gaggtgaagtttatatttgaatatccattctcgttttagg

SEQ ID NO: 88465 - DNA, 40 bp, Homo sapiens
cctaaaacgagaatggatattcaaatataaacttcacctc

SEQ ID NO: 88466 - DNA, 40 bp, Homo sapiens
aggtgaagtttatatttgaatatccattctcgttttagga

SEQ ID NO: 88467 - DNA, 40 bp, Homo sapiens
tcctaaaacgagaatggatattcaaatataaacttcacct

SEQ ID NO: 88468 - DNA, 40 bp, Homo sapiens
ggtgaagtttatatttgaatatccattctcgttttaggac

SEQ ID NO: 88469 - DNA, 40 bp, Homo sapiens
gtcctaaaacgagaatggatattcaaatataaacttcacc

SEQ ID NO: 88470 - DNA, 40 bp, Homo sapiens
gtgaagtttatatttgaatatccattctcgttttaggact

SEQ ID NO: 88471 - DNA, 40 bp, Homo sapiens
agtcctaaaacgagaatggatattcaaatataaacttcac

SEQ ID NO: 88472 - DNA, 40 bp, Homo sapiens
tgaagtttatatttgaatatccattctcgttttaggactc

SEQ ID NO: 88473 - DNA, 40 bp, Homo sapiens
gagtcctaaaacgagaatggatattcaaatataaacttca

SEQ ID NO: 88474 - DNA, 40 bp, Homo sapiens
gaagtttatatttgaatatccattctcgttttaggactct

SEQ ID NO: 88475 - DNA, 40 bp, Homo sapiens
agagtcctaaaacgagaatggatattcaaatataaacttc

SEQ ID NO: 88476 - DNA, 40 bp, Homo sapiens
aagtttatatttgaatatccattctcgttttaggactctt

SEQ ID NO: 88477 - DNA, 40 bp, Homo sapiens
aagagtcctaaaacgagaatggatattcaaatataaactt

SEQ ID NO: 88478 - DNA, 40 bp, Homo sapiens
agtttatatttgaatatccattctcgttttaggactcttc

SEQ ID NO: 88479 - DNA, 40 bp, Homo sapiens
gaagagtcctaaaacgagaatggatattcaaatataaact

SEQ ID NO: 88480 - DNA, 40 bp, Homo sapiens
gtttatatttgaatatccattctcgttttaggactcttct

SEQ ID NO: 88481 - DNA, 40 bp, Homo sapiens
agaagagtcctaaaacgagaatggatattcaaatataaac

SEQ ID NO: 88482 - DNA, 40 bp, Homo sapiens
tttatatttgaatatccattctcgttttaggactcttctt

SEQ ID NO: 88483 - DNA, 40 bp, Homo sapiens
aagaagagtcctaaaacgagaatggatattcaaatataaa

SEQ ID NO: 88484 - DNA, 40 bp, Homo sapiens
ttatatttgaatatccattctcgttttaggactcttcttc

SEQ ID NO: 88485 - DNA, 40 bp, Homo sapiens
gaagaagagtcctaaaacgagaatggatattcaaatataa

SEQ ID NO: 88486 - DNA, 40 bp, Homo sapiens
tatatttgaatatccattctcgttttaggactcttcttcc

SEQ ID NO: 88487 - DNA, 40 bp, Homo sapiens
ggaagaagagtcctaaaacgagaatggatattcaaatata

SEQ ID NO: 88488 - DNA, 40 bp, Homo sapiens
atatttgaatatccattctcgttttaggactcttcttcca

SEQ ID NO: 88489 - DNA, 40 bp, Homo sapiens
tggaagaagagtcctaaaacgagaatggatattcaaatat

SEQ ID NO: 88490 - DNA, 40 bp, Homo sapiens
tatttgaatatccattctcgttttaggactcttcttccat

SEQ ID NO: 88491 - DNA, 40 bp, Homo sapiens
atggaagaagagtcctaaaacgagaatggatattcaaata

SEQ ID NO: 88492 - DNA, 40 bp, Homo sapiens
atttgaatatccattctcgttttaggactcttcttccata

SEQ ID NO: 88493 - DNA, 40 bp, Homo sapiens
tatggaagaagagtcctaaaacgagaatggatattcaaat

SEQ ID NO: 88494 - DNA, 40 bp, Homo sapiens
tttgaatatccattctcgttttaggactcttcttccatat

SEQ ID NO: 88495 - DNA, 40 bp, Homo sapiens
atatggaagaagagtcctaaaacgagaatggatattcaaa

SEQ ID NO: 88496 - DNA, 40 bp, Homo sapiens
ttgaatatccattctcgttttaggactcttcttccatatt

SEQ ID NO: 88497 - DNA, 40 bp, Homo sapiens
aatatggaagaagagtcctaaaacgagaatggatattcaa

SEQ ID NO: 88498 - DNA, 40 bp, Homo sapiens
tgaatatccattctcgttttaggactcttcttccatatta

SEQ ID NO: 88499 - DNA, 40 bp, Homo sapiens
taatatggaagaagagtcctaaaacgagaatggatattca

SEQ ID NO: 88500 - DNA, 40 bp, Homo sapiens
gaatatccattctcgttttaggactcttcttccatattag

SEQ ID NO: 88501 - DNA, 40 bp, Homo sapiens
ctaatatggaagaagagtcctaaaacgagaatggatattc

SEQ ID NO: 88502 - DNA, 40 bp, Homo sapiens
aatatccattctcgttttaggactcttcttccatattagt

SEQ ID NO: 88503 - DNA, 40 bp, Homo sapiens
actaatatggaagaagagtcctaaaacgagaatggatatt

SEQ ID NO: 88504 - DNA, 40 bp, Homo sapiens
atatccattctcgttttaggactcttcttccatattagtg

SEQ ID NO: 88505 - DNA, 40 bp, Homo sapiens
cactaatatggaagaagagtcctaaaacgagaatggatat

SEQ ID NO: 88506 - DNA, 40 bp, Homo sapiens
tatccattctcgttttaggactcttcttccatattagtgt

SEQ ID NO: 88507 - DNA, 40 bp, Homo sapiens
acactaatatggaagaagagtcctaaaacgagaatggata

SEQ ID NO: 88508 - DNA, 40 bp, Homo sapiens
atccattctcgttttaggactcttcttccatattagtgtc

SEQ ID NO: 88509 - DNA, 40 bp, Homo sapiens
gacactaatatggaagaagagtcctaaaacgagaatggat

SEQ ID NO: 88510 - DNA, 40 bp, Homo sapiens
tccattctcgttttaggactcttcttccatattagtgtca

SEQ ID NO: 88511 - DNA, 40 bp, Homo sapiens
tgacactaatatggaagaagagtcctaaaacgagaatgga

SEQ ID NO: 88512 - DNA, 40 bp, Homo sapiens
ccattctcgttttaggactcttcttccatattagtgtcat

SEQ ID NO: 88513 - DNA, 40 bp, Homo sapiens
atgacactaatatggaagaagagtcctaaaacgagaatgg

SEQ ID NO: 88514 - DNA, 40 bp, Homo sapiens
cattctcgttttaggactcttcttccatattagtgtcatc

SEQ ID NO: 88515 - DNA, 40 bp, Homo sapiens
gatgacactaatatggaagaagagtcctaaaacgagaatg

SEQ ID NO: 88516 - DNA, 40 bp, Homo sapiens
attctcgttttaggactcttcttccatattagtgtcatct

SEQ ID NO: 88517 - DNA, 40 bp, Homo sapiens
agatgacactaatatggaagaagagtcctaaaacgagaat

SEQ ID NO: 88518 - DNA, 40 bp, Homo sapiens
ttctcgttttaggactcttcttccatattagtgtcatctt

SEQ ID NO: 88519 - DNA, 40 bp, Homo sapiens
aagatgacactaatatggaagaagagtcctaaaacgagaa

SEQ ID NO: 88520 - DNA, 40 bp, Homo sapiens
tctcgttttaggactcttcttccatattagtgtcatcttg

SEQ ID NO: 88521 - DNA, 40 bp, Homo sapiens
caagatgacactaatatggaagaagagtcctaaaacgaga

SEQ ID NO: 88522 - DNA, 40 bp, Homo sapiens
ctcgttttaggactcttcttccatattagtgtcatcttgc

SEQ ID NO: 88523 - DNA, 40 bp, Homo sapiens
gcaagatgacactaatatggaagaagagtcctaaaacgag

SEQ ID NO: 88524 - DNA, 40 bp, Homo sapiens
tcgttttaggactcttcttccatattagtgtcatcttgcc

SEQ ID NO: 88525 - DNA, 40 bp, Homo sapiens
ggcaagatgacactaatatggaagaagagtcctaaaacga

SEQ ID NO: 88526 - DNA, 40 bp, Homo sapiens
cgttttaggactcttcttccatattagtgtcatcttgcct

SEQ ID NO: 88527 - DNA, 40 bp, Homo sapiens
aggcaagatgacactaatatggaagaagagtcctaaaacg

SEQ ID NO: 88528 - DNA, 40 bp, Homo sapiens
gttttaggactcttcttccatattagtgtcatcttgcctc

SEQ ID NO: 88529 - DNA, 40 bp, Homo sapiens
gaggcaagatgacactaatatggaagaagagtcctaaaac

SEQ ID NO: 88530 - DNA, 40 bp, Homo sapiens
ttttaggactcttcttccatattagtgtcatcttgcctcc

SEQ ID NO: 88531 - DNA, 40 bp, Homo sapiens
ggaggcaagatgacactaatatggaagaagagtcctaaaa

SEQ ID NO: 88532 - DNA, 40 bp, Homo sapiens
tttaggactcttcttccatattagtgtcatcttgcctccc

SEQ ID NO: 88533 - DNA, 40 bp, Homo sapiens
gggaggcaagatgacactaatatggaagaagagtcctaaa

SEQ ID NO: 88534 - DNA, 40 bp, Homo sapiens
ttaggactcttcttccatattagtgtcatcttgcctccct

SEQ ID NO: 88535 - DNA, 40 bp, Homo sapiens
agggaggcaagatgacactaatatggaagaagagtcctaa

SEQ ID NO: 88536 - DNA, 40 bp, Homo sapiens
taggactcttcttccatattagtgtcatcttgcctcccta

SEQ ID NO: 88537 - DNA, 40 bp, Homo sapiens
tagggaggcaagatgacactaatatggaagaagagtccta

SEQ ID NO: 88538 - DNA, 40 bp, Homo sapiens
aggactcttcttccatattagtgtcatcttgcctccctac

SEQ ID NO: 88539 - DNA, 40 bp, Homo sapiens
gtagggaggcaagatgacactaatatggaagaagagtcct

SEQ ID NO: 88540 - DNA, 40 bp, Homo sapiens
ggactcttcttccatattagtgtcatcttgcctccctacc

SEQ ID NO: 88541 - DNA, 40 bp, Homo sapiens
ggtagggaggcaagatgacactaatatggaagaagagtcc

SEQ ID NO: 88542 - DNA, 40 bp, Homo sapiens
gactcttcttccatattagtgtcatcttgcctccctacct

SEQ ID NO: 88543 - DNA, 40 bp, Homo sapiens
aggtagggaggcaagatgacactaatatggaagaagagtc

SEQ ID NO: 88544 - DNA, 40 bp, Homo sapiens
actcttcttccatattagtgtcatcttgcctccctacctt

SEQ ID NO: 88545 - DNA, 40 bp, Homo sapiens
aaggtagggaggcaagatgacactaatatggaagaagagt

SEQ ID NO: 88546 - DNA, 40 bp, Homo sapiens
ctcttcttccatattagtgtcatcttgcctccctaccttc

SEQ ID NO: 88547 - DNA, 40 bp, Homo sapiens
gaaggtagggaggcaagatgacactaatatggaagaagag

SEQ ID NO: 88548 - DNA, 40 bp, Homo sapiens
tcttcttccatattagtgtcatcttgcctccctaccttcc

SEQ ID NO: 88549 - DNA, 40 bp, Homo sapiens
ggaaggtagggaggcaagatgacactaatatggaagaaga

SEQ ID NO: 88550 - DNA, 40 bp, Homo sapiens
cttcttccatattagtgtcatcttgcctccctaccttcca

SEQ ID NO: 88551 - DNA, 40 bp, Homo sapiens
tggaaggtagggaggcaagatgacactaatatggaagaag

SEQ ID NO: 88552 - DNA, 40 bp, Homo sapiens
ttcttccatattagtgtcatcttgcctccctaccttccac

SEQ ID NO: 88553 - DNA, 40 bp, Homo sapiens
gtggaaggtagggaggcaagatgacactaatatggaagaa

SEQ ID NO: 88554 - DNA, 40 bp, Homo sapiens
tcttccatattagtgtcatcttgcctccctaccttccaca

SEQ ID NO: 88555 - DNA, 40 bp, Homo sapiens
tgtggaaggtagggaggcaagatgacactaatatggaaga

SEQ ID NO: 88556 - DNA, 40 bp, Homo sapiens
cttccatattagtgtcatcttgcctccctaccttccacat

SEQ ID NO: 88557 - DNA, 40 bp, Homo sapiens
atgtggaaggtagggaggcaagatgacactaatatggaag

SEQ ID NO: 88558 - DNA, 40 bp, Homo sapiens
ttccatattagtgtcatcttgcctccctaccttccacatg

SEQ ID NO: 88559 - DNA, 40 bp, Homo sapiens
catgtggaaggtagggaggcaagatgacactaatatggaa

SEQ ID NO: 88560 - DNA, 40 bp, Homo sapiens
tccatattagtgtcatcttgcctccctaccttccacatgc

SEQ ID NO: 88561 - DNA, 40 bp, Homo sapiens
gcatgtggaaggtagggaggcaagatgacactaatatgga

SEQ ID NO: 88562 - DNA, 40 bp, Homo sapiens
ccatattagtgtcatcttgcctccctaccttccacatgcc

SEQ ID NO: 88563 - DNA, 40 bp, Homo sapiens
ggcatgtggaaggtagggaggcaagatgacactaatatgg

SEQ ID NO: 88564 - DNA, 40 bp, Homo sapiens
catattagtgtcatcttgcctccctaccttccacatgccc

SEQ ID NO: 88565 - DNA, 40 bp, Homo sapiens
gggcatgtggaaggtagggaggcaagatgacactaatatg

SEQ ID NO: 88566 - DNA, 40 bp, Homo sapiens
atattagtgtcatcttgcctccctaccttccacatgcccc

SEQ ID NO: 88567 - DNA, 40 bp, Homo sapiens
ggggcatgtggaaggtagggaggcaagatgacactaatat

SEQ ID NO: 88568 - DNA, 40 bp, Homo sapiens
tattagtgtcatcttgcctccctaccttccacatgcccca

SEQ ID NO: 88569 - DNA, 40 bp, Homo sapiens
tggggcatgtggaaggtagggaggcaagatgacactaata

SEQ ID NO: 88570 - DNA, 40 bp, Homo sapiens
attagtgtcatcttgcctccctaccttccacatgccccat

SEQ ID NO: 88571 - DNA, 40 bp, Homo sapiens
atggggcatgtggaaggtagggaggcaagatgacactaat

SEQ ID NO: 88572 - DNA, 40 bp, Homo sapiens
ttagtgtcatcttgcctccctaccttccacatgccccatg

SEQ ID NO: 88573 - DNA, 40 bp, Homo sapiens
catggggcatgtggaaggtagggaggcaagatgacactaa

SEQ ID NO: 88574 - DNA, 40 bp, Homo sapiens
tagtgtcatcttgcctccctaccttccacatgccccatga

SEQ ID NO: 88575 - DNA, 40 bp, Homo sapiens
tcatggggcatgtggaaggtagggaggcaagatgacacta

SEQ ID NO: 88576 - DNA, 40 bp, Homo sapiens
agtgtcatcttgcctccctaccttccacatgccccatgac

SEQ ID NO: 88577 - DNA, 40 bp, Homo sapiens
gtcatggggcatgtggaaggtagggaggcaagatgacact

SEQ ID NO: 88578 - DNA, 40 bp, Homo sapiens
gtgtcatcttgcctccctaccttccacatgccccatgact

SEQ ID NO: 88579 - DNA, 40 bp, Homo sapiens
agtcatggggcatgtggaaggtagggaggcaagatgacac

SEQ ID NO: 88580 - DNA, 40 bp, Homo sapiens
tgtcatcttgcctccctaccttccacatgccccatgactt

SEQ ID NO: 88581 - DNA, 40 bp, Homo sapiens
aagtcatggggcatgtggaaggtagggaggcaagatgaca

SEQ ID NO: 88582 - DNA, 40 bp, Homo sapiens
gtcatcttgcctccctaccttccacatgccccatgacttg

SEQ ID NO: 88583 - DNA, 40 bp, Homo sapiens
caagtcatggggcatgtggaaggtagggaggcaagatgac

SEQ ID NO: 88584 - DNA, 40 bp, Homo sapiens
tcatcttgcctccctaccttccacatgccccatgacttga

SEQ ID NO: 88585 - DNA, 40 bp, Homo sapiens
tcaagtcatggggcatgtggaaggtagggaggcaagatga

SEQ ID NO: 88586 - DNA, 40 bp, Homo sapiens
catcttgcctccctaccttccacatgccccatgacttgat

SEQ ID NO: 88587 - DNA, 40 bp, Homo sapiens
atcaagtcatggggcatgtggaaggtagggaggcaagatg

SEQ ID NO: 88588 - DNA, 40 bp, Homo sapiens
atcttgcctccctaccttccacatgccccatgacttgatg

SEQ ID NO: 88589 - DNA, 40 bp, Homo sapiens
catcaagtcatggggcatgtggaaggtagggaggcaagat

SEQ ID NO: 88590 - DNA, 40 bp, Homo sapiens
tcttgcctccctaccttccacatgccccatgacttgatgc

SEQ ID NO: 88591 - DNA, 40 bp, Homo sapiens
gcatcaagtcatggggcatgtggaaggtagggaggcaaga

SEQ ID NO: 88592 - DNA, 40 bp, Homo sapiens
cttgcctccctaccttccacatgccccatgacttgatgca

SEQ ID NO: 88593 - DNA, 40 bp, Homo sapiens
tgcatcaagtcatggggcatgtggaaggtagggaggcaag

SEQ ID NO: 88594 - DNA, 40 bp, Homo sapiens
ttgcctccctaccttccacatgccccatgacttgatgcag

SEQ ID NO: 88595 - DNA, 40 bp, Homo sapiens
ctgcatcaagtcatggggcatgtggaaggtagggaggcaa

SEQ ID NO: 88596 - DNA, 40 bp, Homo sapiens
tgcctccctaccttccacatgccccatgacttgatgcagt

SEQ ID NO: 88597 - DNA, 40 bp, Homo sapiens
actgcatcaagtcatggggcatgtggaaggtagggaggca

SEQ ID NO: 88598 - DNA, 40 bp, Homo sapiens
gcctccctaccttccacatgccccatgacttgatgcagtt

SEQ ID NO: 88599 - DNA, 40 bp, Homo sapiens
aactgcatcaagtcatggggcatgtggaaggtagggaggc

SEQ ID NO: 88600 - DNA, 40 bp, Homo sapiens
cctccctaccttccacatgccccatgacttgatgcagttt

SEQ ID NO: 88601 - DNA, 40 bp, Homo sapiens
aaactgcatcaagtcatggggcatgtggaaggtagggagg

SEQ ID NO: 88602 - DNA, 40 bp, Homo sapiens
ctccctaccttccacatgccccatgacttgatgcagtttt

SEQ ID NO: 88603 - DNA, 40 bp, Homo sapiens
aaaactgcatcaagtcatggggcatgtggaaggtagggag

SEQ ID NO: 88604 - DNA, 40 bp, Homo sapiens
tccctaccttccacatgccccatgacttgatgcagtttta

SEQ ID NO: 88605 - DNA, 40 bp, Homo sapiens
taaaactgcatcaagtcatggggcatgtggaaggtaggga

SEQ ID NO: 88606 - DNA, 40 bp, Homo sapiens
ccctaccttccacatgccccatgacttgatgcagttttaa

SEQ ID NO: 88607 - DNA, 40 bp, Homo sapiens
ttaaaactgcatcaagtcatggggcatgtggaaggtaggg

SEQ ID NO: 88608 - DNA, 40 bp, Homo sapiens
cctaccttccacatgccccatgacttgatgcagttttaat

SEQ ID NO: 88609 - DNA, 40 bp, Homo sapiens
attaaaactgcatcaagtcatggggcatgtggaaggtagg

SEQ ID NO: 88610 - DNA, 40 bp, Homo sapiens
ctaccttccacatgccccatgacttgatgcagttttaata

SEQ ID NO: 88611 - DNA, 40 bp, Homo sapiens
tattaaaactgcatcaagtcatggggcatgtggaaggtag

SEQ ID NO: 88612 - DNA, 40 bp, Homo sapiens
taccttccacatgccccatgacttgatgcagttttaatac

SEQ ID NO: 88613 - DNA, 40 bp, Homo sapiens
gtattaaaactgcatcaagtcatggggcatgtggaaggta

SEQ ID NO: 88614 - DNA, 40 bp, Homo sapiens
accttccacatgccccatgacttgatgcagttttaatact

SEQ ID NO: 88615 - DNA, 40 bp, Homo sapiens
agtattaaaactgcatcaagtcatggggcatgtggaaggt

SEQ ID NO: 88616 - DNA, 40 bp, Homo sapiens
ccttccacatgccccatgacttgatgcagttttaatactt

SEQ ID NO: 88617 - DNA, 40 bp, Homo sapiens
aagtattaaaactgcatcaagtcatggggcatgtggaagg

SEQ ID NO: 88618 - DNA, 40 bp, Homo sapiens
cttccacatgccccatgacttgatgcagttttaatacttg

SEQ ID NO: 88619 - DNA, 40 bp, Homo sapiens
caagtattaaaactgcatcaagtcatggggcatgtggaag

SEQ ID NO: 88620 - DNA, 40 bp, Homo sapiens
ttccacatgccccatgacttgatgcagttttaatacttgt

SEQ ID NO: 88621 - DNA, 40 bp, Homo sapiens
acaagtattaaaactgcatcaagtcatggggcatgtggaa

SEQ ID NO: 88622 - DNA, 40 bp, Homo sapiens
tccacatgccccatgacttgatgcagttttaatacttgta

SEQ ID NO: 88623 - DNA, 40 bp, Homo sapiens
tacaagtattaaaactgcatcaagtcatggggcatgtgga

SEQ ID NO: 88624 - DNA, 40 bp, Homo sapiens
ccacatgccccatgacttgatgcagttttaatacttgtaa

SEQ ID NO: 88625 - DNA, 40 bp, Homo sapiens
ttacaagtattaaaactgcatcaagtcatggggcatgtgg

SEQ ID NO: 88626 - DNA, 40 bp, Homo sapiens
cacatgccccatgacttgatgcagttttaatacttgtaat

SEQ ID NO: 88627 - DNA, 40 bp, Homo sapiens
attacaagtattaaaactgcatcaagtcatggggcatgtg

SEQ ID NO: 88628 - DNA, 40 bp, Homo sapiens
acatgccccatgacttgatgcagttttaatacttgtaatt

SEQ ID NO: 88629 - DNA, 40 bp, Homo sapiens
aattacaagtattaaaactgcatcaagtcatggggcatgt

SEQ ID NO: 88630 - DNA, 40 bp, Homo sapiens
catgccccatgacttgatgcagttttaatacttgtaattc

SEQ ID NO: 88631 - DNA, 40 bp, Homo sapiens
gaattacaagtattaaaactgcatcaagtcatggggcatg

SEQ ID NO: 88632 - DNA, 40 bp, Homo sapiens
atgccccatgacttgatgcagttttaatacttgtaattcc

SEQ ID NO: 88633 - DNA, 40 bp, Homo sapiens
ggaattacaagtattaaaactgcatcaagtcatggggcat

SEQ ID NO: 88634 - DNA, 40 bp, Homo sapiens
tgccccatgacttgatgcagttttaatacttgtaattccc

SEQ ID NO: 88635 - DNA, 40 bp, Homo sapiens
gggaattacaagtattaaaactgcatcaagtcatggggca

SEQ ID NO: 88636 - DNA, 40 bp, Homo sapiens
gccccatgacttgatgcagttttaatacttgtaattcccc

SEQ ID NO: 88637 - DNA, 40 bp, Homo sapiens
ggggaattacaagtattaaaactgcatcaagtcatggggc

SEQ ID NO: 88638 - DNA, 40 bp, Homo sapiens
ccccatgacttgatgcagttttaatacttgtaattcccct

SEQ ID NO: 88639 - DNA, 40 bp, Homo sapiens
aggggaattacaagtattaaaactgcatcaagtcatgggg

SEQ ID NO: 88640 - DNA, 40 bp, Homo sapiens
cccatgacttgatgcagttttaatacttgtaattccccta

SEQ ID NO: 88641 - DNA, 40 bp, Homo sapiens
taggggaattacaagtattaaaactgcatcaagtcatggg

SEQ ID NO: 88642 - DNA, 40 bp, Homo sapiens
ccatgacttgatgcagttttaatacttgtaattcccctaa

SEQ ID NO: 88643 - DNA, 40 bp, Homo sapiens
ttaggggaattacaagtattaaaactgcatcaagtcatgg

SEQ ID NO: 88644 - DNA, 40 bp, Homo sapiens
catgacttgatgcagttttaatacttgtaattcccctaac

SEQ ID NO: 88645 - DNA, 40 bp, Homo sapiens
gttaggggaattacaagtattaaaactgcatcaagtcatg

SEQ ID NO: 88646 - DNA, 40 bp, Homo sapiens
atgacttgatgcagttttaatacttgtaattcccctaacc

SEQ ID NO: 88647 - DNA, 40 bp, Homo sapiens
ggttaggggaattacaagtattaaaactgcatcaagtcat

SEQ ID NO: 88648 - DNA, 40 bp, Homo sapiens
tgacttgatgcagttttaatacttgtaattcccctaacca

SEQ ID NO: 88649 - DNA, 40 bp, Homo sapiens
tggttaggggaattacaagtattaaaactgcatcaagtca

SEQ ID NO: 88650 - DNA, 40 bp, Homo sapiens
gacttgatgcagttttaatacttgtaattcccctaaccat

SEQ ID NO: 88651 - DNA, 40 bp, Homo sapiens
atggttaggggaattacaagtattaaaactgcatcaagtc

SEQ ID NO: 88652 - DNA, 40 bp, Homo sapiens
acttgatgcagttttaatacttgtaattcccctaaccata

SEQ ID NO: 88653 - DNA, 40 bp, Homo sapiens
tatggttaggggaattacaagtattaaaactgcatcaagt

SEQ ID NO: 88654 - DNA, 40 bp, Homo sapiens
cttgatgcagttttaatacttgtaattcccctaaccataa

SEQ ID NO: 88655 - DNA, 40 bp, Homo sapiens
ttatggttaggggaattacaagtattaaaactgcatcaag

SEQ ID NO: 88656 - DNA, 40 bp, Homo sapiens
ttgatgcagttttaatacttgtaattcccctaaccataag

SEQ ID NO: 88657 - DNA, 40 bp, Homo sapiens
cttatggttaggggaattacaagtattaaaactgcatcaa

SEQ ID NO: 88658 - DNA, 40 bp, Homo sapiens
tgatgcagttttaatacttgtaattcccctaaccataaga

SEQ ID NO: 88659 - DNA, 40 bp, Homo sapiens
tcttatggttaggggaattacaagtattaaaactgcatca

SEQ ID NO: 88660 - DNA, 40 bp, Homo sapiens
gatgcagttttaatacttgtaattcccctaaccataagat

SEQ ID NO: 88661 - DNA, 40 bp, Homo sapiens
atcttatggttaggggaattacaagtattaaaactgcatc

SEQ ID NO: 88662 - DNA, 40 bp, Homo sapiens
atgcagttttaatacttgtaattcccctaaccataagatt

SEQ ID NO: 88663 - DNA, 40 bp, Homo sapiens
aatcttatggttaggggaattacaagtattaaaactgcat

SEQ ID NO: 88664 - DNA, 40 bp, Homo sapiens
tgcagttttaatacttgtaattcccctaaccataagattt

SEQ ID NO: 88665 - DNA, 40 bp, Homo sapiens
aaatcttatggttaggggaattacaagtattaaaactgca

SEQ ID NO: 88666 - DNA, 40 bp, Homo sapiens
gcagttttaatacttgtaattcccctaaccataagattta

SEQ ID NO: 88667 - DNA, 40 bp, Homo sapiens
taaatcttatggttaggggaattacaagtattaaaactgc

SEQ ID NO: 88668 - DNA, 40 bp, Homo sapiens
cagttttaatacttgtaattcccctaaccataagatttac

SEQ ID NO: 88669 - DNA, 40 bp, Homo sapiens
gtaaatcttatggttaggggaattacaagtattaaaactg

SEQ ID NO: 88670 - DNA, 40 bp, Homo sapiens
agttttaatacttgtaattcccctaaccataagatttact

SEQ ID NO: 88671 - DNA, 40 bp, Homo sapiens
agtaaatcttatggttaggggaattacaagtattaaaact

SEQ ID NO: 88672 - DNA, 40 bp, Homo sapiens
gttttaatacttgtaattcccctaaccataagatttactg

SEQ ID NO: 88673 - DNA, 40 bp, Homo sapiens
cagtaaatcttatggttaggggaattacaagtattaaaac

SEQ ID NO: 88674 - DNA, 40 bp, Homo sapiens
ttttaatacttgtaattcccctaaccataagatttactgc

SEQ ID NO: 88675 - DNA, 40 bp, Homo sapiens
gcagtaaatcttatggttaggggaattacaagtattaaaa

SEQ ID NO: 88676 - DNA, 40 bp, Homo sapiens
tttaatacttgtaattcccctaaccataagatttactgct

SEQ ID NO: 88677 - DNA, 40 bp, Homo sapiens
agcagtaaatcttatggttaggggaattacaagtattaaa

SEQ ID NO: 88678 - DNA, 40 bp, Homo sapiens
ttaatacttgtaattcccctaaccataagatttactgctg

SEQ ID NO: 88679 - DNA, 40 bp, Homo sapiens
cagcagtaaatcttatggttaggggaattacaagtattaa

SEQ ID NO: 88680 - DNA, 40 bp, Homo sapiens
taatacttgtaattcccctaaccataagatttactgctgc

SEQ ID NO: 88681 - DNA, 40 bp, Homo sapiens
gcagcagtaaatcttatggttaggggaattacaagtatta

SEQ ID NO: 88682 - DNA, 40 bp, Homo sapiens
aatacttgtaattcccctaaccataagatttactgctgct

SEQ ID NO: 88683 - DNA, 40 bp, Homo sapiens
agcagcagtaaatcttatggttaggggaattacaagtatt

SEQ ID NO: 88684 - DNA, 40 bp, Homo sapiens
atacttgtaattcccctaaccataagatttactgctgctg

SEQ ID NO: 88685 - DNA, 40 bp, Homo sapiens
cagcagcagtaaatcttatggttaggggaattacaagtat

SEQ ID NO: 88686 - DNA, 40 bp, Homo sapiens
tacttgtaattcccctaaccataagatttactgctgctgt

SEQ ID NO: 88687 - DNA, 40 bp, Homo sapiens
acagcagcagtaaatcttatggttaggggaattacaagta

SEQ ID NO: 88688 - DNA, 40 bp, Homo sapiens
acttgtaattcccctaaccataagatttactgctgctgtg

SEQ ID NO: 88689 - DNA, 40 bp, Homo sapiens
cacagcagcagtaaatcttatggttaggggaattacaagt

SEQ ID NO: 88690 - DNA, 40 bp, Homo sapiens
cttgtaattcccctaaccataagatttactgctgctgtgg

SEQ ID NO: 88691 - DNA, 40 bp, Homo sapiens
ccacagcagcagtaaatcttatggttaggggaattacaag

SEQ ID NO: 88692 - DNA, 40 bp, Homo sapiens
ttgtaattcccctaaccataagatttactgctgctgtgga

SEQ ID NO: 88693 - DNA, 40 bp, Homo sapiens
tccacagcagcagtaaatcttatggttaggggaattacaa

SEQ ID NO: 88694 - DNA, 40 bp, Homo sapiens
tgtaattcccctaaccataagatttactgctgctgtggat

SEQ ID NO: 88695 - DNA, 40 bp, Homo sapiens
atccacagcagcagtaaatcttatggttaggggaattaca

SEQ ID NO: 88696 - DNA, 40 bp, Homo sapiens
gtaattcccctaaccataagatttactgctgctgtggata

SEQ ID NO: 88697 - DNA, 40 bp, Homo sapiens
tatccacagcagcagtaaatcttatggttaggggaattac

SEQ ID NO: 88698 - DNA, 40 bp, Homo sapiens
taattcccctaaccataagatttactgctgctgtggatat

SEQ ID NO: 88699 - DNA, 40 bp, Homo sapiens
atatccacagcagcagtaaatcttatggttaggggaatta

SEQ ID NO: 88700 - DNA, 40 bp, Homo sapiens
aattcccctaaccataagatttactgctgctgtggatatc

SEQ ID NO: 88701 - DNA, 40 bp, Homo sapiens
gatatccacagcagcagtaaatcttatggttaggggaatt

SEQ ID NO: 88702 - DNA, 40 bp, Homo sapiens
attcccctaaccataagatttactgctgctgtggatatct

SEQ ID NO: 88703 - DNA, 40 bp, Homo sapiens
agatatccacagcagcagtaaatcttatggttaggggaat

SEQ ID NO: 88704 - DNA, 40 bp, Homo sapiens
ttcccctaaccataagatttactgctgctgtggatatctc

SEQ ID NO: 88705 - DNA, 40 bp, Homo sapiens
gagatatccacagcagcagtaaatcttatggttaggggaa

SEQ ID NO: 88706 - DNA, 40 bp, Homo sapiens
tcccctaaccataagatttactgctgctgtggatatctcc

SEQ ID NO: 88707 - DNA, 40 bp, Homo sapiens
ggagatatccacagcagcagtaaatcttatggttagggga

SEQ ID NO: 88708 - DNA, 40 bp, Homo sapiens
cccctaaccataagatttactgctgctgtggatatctcca

SEQ ID NO: 88709 - DNA, 40 bp, Homo sapiens
tggagatatccacagcagcagtaaatcttatggttagggg

SEQ ID NO: 88710 - DNA, 40 bp, Homo sapiens
ccctaaccataagatttactgctgctgtggatatctccat

SEQ ID NO: 88711 - DNA, 40 bp, Homo sapiens
atggagatatccacagcagcagtaaatcttatggttaggg

SEQ ID NO: 88712 - DNA, 40 bp, Homo sapiens
cctaaccataagatttactgctgctgtggatatctccatg

SEQ ID NO: 88713 - DNA, 40 bp, Homo sapiens
catggagatatccacagcagcagtaaatcttatggttagg

SEQ ID NO: 88714 - DNA, 40 bp, Homo sapiens
ctaaccataagatttactgctgctgtggatatctccatga

SEQ ID NO: 88715 - DNA, 40 bp, Homo sapiens
tcatggagatatccacagcagcagtaaatcttatggttag

SEQ ID NO: 88716 - DNA, 40 bp, Homo sapiens
taaccataagatttactgctgctgtggatatctccatgaa

SEQ ID NO: 88717 - DNA, 40 bp, Homo sapiens
ttcatggagatatccacagcagcagtaaatcttatggtta

SEQ ID NO: 88718 - DNA, 40 bp, Homo sapiens
aaccataagatttactgctgctgtggatatctccatgaag

SEQ ID NO: 88719 - DNA, 40 bp, Homo sapiens
cttcatggagatatccacagcagcagtaaatcttatggtt

SEQ ID NO: 88720 - DNA, 40 bp, Homo sapiens
accataagatttactgctgctgtggatatctccatgaagt

SEQ ID NO: 88721 - DNA, 40 bp, Homo sapiens
acttcatggagatatccacagcagcagtaaatcttatggt

SEQ ID NO: 88722 - DNA, 40 bp, Homo sapiens
ccataagatttactgctgctgtggatatctccatgaagtt

SEQ ID NO: 88723 - DNA, 40 bp, Homo sapiens
aacttcatggagatatccacagcagcagtaaatcttatgg

SEQ ID NO: 88724 - DNA, 40 bp, Homo sapiens
cataagatttactgctgctgtggatatctccatgaagttt

SEQ ID NO: 88725 - DNA, 40 bp, Homo sapiens
aaacttcatggagatatccacagcagcagtaaatcttatg

SEQ ID NO: 88726 - DNA, 40 bp, Homo sapiens
ataagatttactgctgctgtggatatctccatgaagtttt

SEQ ID NO: 88727 - DNA, 40 bp, Homo sapiens
aaaacttcatggagatatccacagcagcagtaaatcttat

SEQ ID NO: 88728 - DNA, 40 bp, Homo sapiens
taagatttactgctgctgtggatatctccatgaagttttc

SEQ ID NO: 88729 - DNA, 40 bp, Homo sapiens
gaaaacttcatggagatatccacagcagcagtaaatctta

SEQ ID NO: 88730 - DNA, 40 bp, Homo sapiens
aagatttactgctgctgtggatatctccatgaagttttcc

SEQ ID NO: 88731 - DNA, 40 bp, Homo sapiens
ggaaaacttcatggagatatccacagcagcagtaaatctt

SEQ ID NO: 88732 - DNA, 40 bp, Homo sapiens
agatttactgctgctgtggatatctccatgaagttttccc

SEQ ID NO: 88733 - DNA, 40 bp, Homo sapiens
gggaaaacttcatggagatatccacagcagcagtaaatct

SEQ ID NO: 88734 - DNA, 40 bp, Homo sapiens
gatttactgctgctgtggatatctccatgaagttttccca

SEQ ID NO: 88735 - DNA, 40 bp, Homo sapiens
tgggaaaacttcatggagatatccacagcagcagtaaatc

SEQ ID NO: 88736 - DNA, 40 bp, Homo sapiens
atttactgctgctgtggatatctccatgaagttttcccac

SEQ ID NO: 88737 - DNA, 40 bp, Homo sapiens
gtgggaaaacttcatggagatatccacagcagcagtaaat

SEQ ID NO: 88738 - DNA, 40 bp, Homo sapiens
tttactgctgctgtggatatctccatgaagttttcccact

SEQ ID NO: 88739 - DNA, 40 bp, Homo sapiens
agtgggaaaacttcatggagatatccacagcagcagtaaa

SEQ ID NO: 88740 - DNA, 40 bp, Homo sapiens
ttactgctgctgtggatatctccatgaagttttcccactg

SEQ ID NO: 88741 - DNA, 40 bp, Homo sapiens
cagtgggaaaacttcatggagatatccacagcagcagtaa

SEQ ID NO: 88742 - DNA, 40 bp, Homo sapiens
tactgctgctgtggatatctccatgaagttttcccactga

SEQ ID NO: 88743 - DNA, 40 bp, Homo sapiens
tcagtgggaaaacttcatggagatatccacagcagcagta

SEQ ID NO: 88744 - DNA, 40 bp, Homo sapiens
actgctgctgtggatatctccatgaagttttcccactgag

SEQ ID NO: 88745 - DNA, 40 bp, Homo sapiens
ctcagtgggaaaacttcatggagatatccacagcagcagt

SEQ ID NO: 88746 - DNA, 40 bp, Homo sapiens
ctgctgctgtggatatctccatgaagttttcccactgagt

SEQ ID NO: 88747 - DNA, 40 bp, Homo sapiens
actcagtgggaaaacttcatggagatatccacagcagcag

SEQ ID NO: 88748 - DNA, 40 bp, Homo sapiens
tgctgctgtggatatctccatgaagttttcccactgagtc

SEQ ID NO: 88749 - DNA, 40 bp, Homo sapiens
gactcagtgggaaaacttcatggagatatccacagcagca

SEQ ID NO: 88750 - DNA, 40 bp, Homo sapiens
gctgctgtggatatctccatgaagttttcccactgagtca

SEQ ID NO: 88751 - DNA, 40 bp, Homo sapiens
tgactcagtgggaaaacttcatggagatatccacagcagc

SEQ ID NO: 88752 - DNA, 40 bp, Homo sapiens
ctgctgtggatatctccatgaagttttcccactgagtcac

SEQ ID NO: 88753 - DNA, 40 bp, Homo sapiens
gtgactcagtgggaaaacttcatggagatatccacagcag

SEQ ID NO: 88754 - DNA, 40 bp, Homo sapiens
tgctgtggatatctccatgaagttttcccactgagtcaca

SEQ ID NO: 88755 - DNA, 40 bp, Homo sapiens
tgtgactcagtgggaaaacttcatggagatatccacagca

SEQ ID NO: 88756 - DNA, 40 bp, Homo sapiens
gctgtggatatctccatgaagttttcccactgagtcacat

SEQ ID NO: 88757 - DNA, 40 bp, Homo sapiens
atgtgactcagtgggaaaacttcatggagatatccacagc

SEQ ID NO: 88758 - DNA, 40 bp, Homo sapiens
ctgtggatatctccatgaagttttcccactgagtcacatc

SEQ ID NO: 88759 - DNA, 40 bp, Homo sapiens
gatgtgactcagtgggaaaacttcatggagatatccacag

SEQ ID NO: 88760 - DNA, 40 bp, Homo sapiens
tgtggatatctccatgaagttttcccactgagtcacatca

SEQ ID NO: 88761 - DNA, 40 bp, Homo sapiens
tgatgtgactcagtgggaaaacttcatggagatatccaca

SEQ ID NO: 88762 - DNA, 40 bp, Homo sapiens
gtggatatctccatgaagttttcccactgagtcacatcag

SEQ ID NO: 88763 - DNA, 40 bp, Homo sapiens
ctgatgtgactcagtgggaaaacttcatggagatatccac

SEQ ID NO: 88764 - DNA, 40 bp, Homo sapiens
tggatatctccatgaagttttcccactgagtcacatcaga

SEQ ID NO: 88765 - DNA, 40 bp, Homo sapiens
tctgatgtgactcagtgggaaaacttcatggagatatcca

SEQ ID NO: 88766 - DNA, 40 bp, Homo sapiens
ggatatctccatgaagttttcccactgagtcacatcagaa

SEQ ID NO: 88767 - DNA, 40 bp, Homo sapiens
ttctgatgtgactcagtgggaaaacttcatggagatatcc

SEQ ID NO: 88768 - DNA, 40 bp, Homo sapiens
gatatctccatgaagttttcccactgagtcacatcagaaa

SEQ ID NO: 88769 - DNA, 40 bp, Homo sapiens
tttctgatgtgactcagtgggaaaacttcatggagatatc

SEQ ID NO: 88770 - DNA, 40 bp, Homo sapiens
atatctccatgaagttttcccactgagtcacatcagaaat

SEQ ID NO: 88771 - DNA, 40 bp, Homo sapiens
atttctgatgtgactcagtgggaaaacttcatggagatat

SEQ ID NO: 88772 - DNA, 40 bp, Homo sapiens
tatctccatgaagttttcccactgagtcacatcagaaatg

SEQ ID NO: 88773 - DNA, 40 bp, Homo sapiens
catttctgatgtgactcagtgggaaaacttcatggagata

SEQ ID NO: 88774 - DNA, 40 bp, Homo sapiens
atctccatgaagttttcccactgagtcacatcagaaatgc

SEQ ID NO: 88775 - DNA, 40 bp, Homo sapiens
gcatttctgatgtgactcagtgggaaaacttcatggagat

SEQ ID NO: 88776 - DNA, 40 bp, Homo sapiens
tctccatgaagttttcccactgagtcacatcagaaatgcc

SEQ ID NO: 88777 - DNA, 40 bp, Homo sapiens
ggcatttctgatgtgactcagtgggaaaacttcatggaga

SEQ ID NO: 88778 - DNA, 40 bp, Homo sapiens
ctccatgaagttttcccactgagtcacatcagaaatgccc

SEQ ID NO: 88779 - DNA, 40 bp, Homo sapiens
gggcatttctgatgtgactcagtgggaaaacttcatggag

SEQ ID NO: 88780 - DNA, 40 bp, Homo sapiens
tccatgaagttttcccactgagtcacatcagaaatgccct

SEQ ID NO: 88781 - DNA, 40 bp, Homo sapiens
agggcatttctgatgtgactcagtgggaaaacttcatgga

SEQ ID NO: 88782 - DNA, 40 bp, Homo sapiens
ccatgaagttttcccactgagtcacatcagaaatgcccta

SEQ ID NO: 88783 - DNA, 40 bp, Homo sapiens
tagggcatttctgatgtgactcagtgggaaaacttcatgg

SEQ ID NO: 88784 - DNA, 40 bp, Homo sapiens
catgaagttttcccactgagtcacatcagaaatgccctac

SEQ ID NO: 88785 - DNA, 40 bp, Homo sapiens
gtagggcatttctgatgtgactcagtgggaaaacttcatg

SEQ ID NO: 88786 - DNA, 40 bp, Homo sapiens
atgaagttttcccactgagtcacatcagaaatgccctaca

SEQ ID NO: 88787 - DNA, 40 bp, Homo sapiens
tgtagggcatttctgatgtgactcagtgggaaaacttcat

SEQ ID NO: 88788 - DNA, 40 bp, Homo sapiens
tgaagttttcccactgagtcacatcagaaatgccctacat

SEQ ID NO: 88789 - DNA, 40 bp, Homo sapiens
atgtagggcatttctgatgtgactcagtgggaaaacttca

SEQ ID NO: 88790 - DNA, 40 bp, Homo sapiens
gaagttttcccactgagtcacatcagaaatgccctacatc

SEQ ID NO: 88791 - DNA, 40 bp, Homo sapiens
gatgtagggcatttctgatgtgactcagtgggaaaacttc

SEQ ID NO: 88792 - DNA, 40 bp, Homo sapiens
aagttttcccactgagtcacatcagaaatgccctacatct

SEQ ID NO: 88793 - DNA, 40 bp, Homo sapiens
agatgtagggcatttctgatgtgactcagtgggaaaactt

SEQ ID NO: 88794 - DNA, 40 bp, Homo sapiens
agttttcccactgagtcacatcagaaatgccctacatctt

SEQ ID NO: 88795 - DNA, 40 bp, Homo sapiens
aagatgtagggcatttctgatgtgactcagtgggaaaact

SEQ ID NO: 88796 - DNA, 40 bp, Homo sapiens
gttttcccactgagtcacatcagaaatgccctacatctta

SEQ ID NO: 88797 - DNA, 40 bp, Homo sapiens
taagatgtagggcatttctgatgtgactcagtgggaaaac

SEQ ID NO: 88798 - DNA, 40 bp, Homo sapiens
ttttcccactgagtcacatcagaaatgccctacatcttat

SEQ ID NO: 88799 - DNA, 40 bp, Homo sapiens
ataagatgtagggcatttctgatgtgactcagtgggaaaa

SEQ ID NO: 88800 - DNA, 40 bp, Homo sapiens
tttcccactgagtcacatcagaaatgccctacatcttatt

SEQ ID NO: 88801 - DNA, 40 bp, Homo sapiens
aataagatgtagggcatttctgatgtgactcagtgggaaa

SEQ ID NO: 88802 - DNA, 40 bp, Homo sapiens
ttcccactgagtcacatcagaaatgccctacatcttattt

SEQ ID NO: 88803 - DNA, 40 bp, Homo sapiens
aaataagatgtagggcatttctgatgtgactcagtgggaa

SEQ ID NO: 88804 - DNA, 40 bp, Homo sapiens
tcccactgagtcacatcagaaatgccctacatcttatttc

SEQ ID NO: 88805 - DNA, 40 bp, Homo sapiens
gaaataagatgtagggcatttctgatgtgactcagtggga

SEQ ID NO: 88806 - DNA, 40 bp, Homo sapiens
cccactgagtcacatcagaaatgccctacatcttatttcc

SEQ ID NO: 88807 - DNA, 40 bp, Homo sapiens
ggaaataagatgtagggcatttctgatgtgactcagtggg

SEQ ID NO: 88808 - DNA, 40 bp, Homo sapiens
ccactgagtcacatcagaaatgccctacatcttatttcct

SEQ ID NO: 88809 - DNA, 40 bp, Homo sapiens
aggaaataagatgtagggcatttctgatgtgactcagtgg

SEQ ID NO: 88810 - DNA, 40 bp, Homo sapiens
cactgagtcacatcagaaatgccctacatcttatttcctc

SEQ ID NO: 88811 - DNA, 40 bp, Homo sapiens
gaggaaataagatgtagggcatttctgatgtgactcagtg

SEQ ID NO: 88812 - DNA, 40 bp, Homo sapiens
actgagtcacatcagaaatgccctacatcttatttcctca

SEQ ID NO: 88813 - DNA, 40 bp, Homo sapiens
tgaggaaataagatgtagggcatttctgatgtgactcagt

SEQ ID NO: 88814 - DNA, 40 bp, Homo sapiens
ctgagtcacatcagaaatgccctacatcttatttcctcag

SEQ ID NO: 88815 - DNA, 40 bp, Homo sapiens
ctgaggaaataagatgtagggcatttctgatgtgactcag

SEQ ID NO: 88816 - DNA, 40 bp, Homo sapiens
tgagtcacatcagaaatgccctacatcttatttcctcagg

SEQ ID NO: 88817 - DNA, 40 bp, Homo sapiens
cctgaggaaataagatgtagggcatttctgatgtgactca

SEQ ID NO: 88818 - DNA, 40 bp, Homo sapiens
gagtcacatcagaaatgccctacatcttatttcctcaggg

SEQ ID NO: 88819 - DNA, 40 bp, Homo sapiens
ccctgaggaaataagatgtagggcatttctgatgtgactc

SEQ ID NO: 88820 - DNA, 40 bp, Homo sapiens
agtcacatcagaaatgccctacatcttatttcctcagggc

SEQ ID NO: 88821 - DNA, 40 bp, Homo sapiens
gccctgaggaaataagatgtagggcatttctgatgtgact

SEQ ID NO: 88822 - DNA, 40 bp, Homo sapiens
gtcacatcagaaatgccctacatcttatttcctcagggct

SEQ ID NO: 88823 - DNA, 40 bp, Homo sapiens
agccctgaggaaataagatgtagggcatttctgatgtgac

SEQ ID NO: 88824 - DNA, 40 bp, Homo sapiens
tcacatcagaaatgccctacatcttatttcctcagggctc

SEQ ID NO: 88825 - DNA, 40 bp, Homo sapiens
gagccctgaggaaataagatgtagggcatttctgatgtga

SEQ ID NO: 88826 - DNA, 40 bp, Homo sapiens
cacatcagaaatgccctacatcttatttcctcagggctca

SEQ ID NO: 88827 - DNA, 40 bp, Homo sapiens
tgagccctgaggaaataagatgtagggcatttctgatgtg

SEQ ID NO: 88828 - DNA, 40 bp, Homo sapiens
acatcagaaatgccctacatcttatttcctcagggctcaa

SEQ ID NO: 88829 - DNA, 40 bp, Homo sapiens
ttgagccctgaggaaataagatgtagggcatttctgatgt

SEQ ID NO: 88830 - DNA, 40 bp, Homo sapiens
catcagaaatgccctacatcttatttcctcagggctcaag

SEQ ID NO: 88831 - DNA, 40 bp, Homo sapiens
cttgagccctgaggaaataagatgtagggcatttctgatg

SEQ ID NO: 88832 - DNA, 40 bp, Homo sapiens
atcagaaatgccctacatcttatttcctcagggctcaaga

SEQ ID NO: 88833 - DNA, 40 bp, Homo sapiens
tcttgagccctgaggaaataagatgtagggcatttctgat

SEQ ID NO: 88834 - DNA, 40 bp, Homo sapiens
tcagaaatgccctacatcttatttcctcagggctcaagag

SEQ ID NO: 88835 - DNA, 40 bp, Homo sapiens
ctcttgagccctgaggaaataagatgtagggcatttctga

SEQ ID NO: 88836 - DNA, 40 bp, Homo sapiens
cagaaatgccctacatcttatttcctcagggctcaagaga

SEQ ID NO: 88837 - DNA, 40 bp, Homo sapiens
tctcttgagccctgaggaaataagatgtagggcatttctg

SEQ ID NO: 88838 - DNA, 40 bp, Homo sapiens
agaaatgccctacatcttatttcctcagggctcaagagaa

SEQ ID NO: 88839 - DNA, 40 bp, Homo sapiens
ttctcttgagccctgaggaaataagatgtagggcatttct

SEQ ID NO: 88840 - DNA, 40 bp, Homo sapiens
gaaatgccctacatcttatttcctcagggctcaagagaat

SEQ ID NO: 88841 - DNA, 40 bp, Homo sapiens
attctcttgagccctgaggaaataagatgtagggcatttc

SEQ ID NO: 88842 - DNA, 40 bp, Homo sapiens
aaatgccctacatcttatttcctcagggctcaagagaatc

SEQ ID NO: 88843 - DNA, 40 bp, Homo sapiens
gattctcttgagccctgaggaaataagatgtagggcattt

SEQ ID NO: 88844 - DNA, 40 bp, Homo sapiens
aatgccctacatcttatttcctcagggctcaagagaatct

SEQ ID NO: 88845 - DNA, 40 bp, Homo sapiens
agattctcttgagccctgaggaaataagatgtagggcatt

SEQ ID NO: 88846 - DNA, 40 bp, Homo sapiens
atgccctacatcttatttcctcagggctcaagagaatctg

SEQ ID NO: 88847 - DNA, 40 bp, Homo sapiens
cagattctcttgagccctgaggaaataagatgtagggcat

SEQ ID NO: 88848 - DNA, 40 bp, Homo sapiens
tgccctacatcttatttcctcagggctcaagagaatctga

SEQ ID NO: 88849 - DNA, 40 bp, Homo sapiens
tcagattctcttgagccctgaggaaataagatgtagggca

SEQ ID NO: 88850 - DNA, 40 bp, Homo sapiens
gccctacatcttatttcctcagggctcaagagaatctgac

SEQ ID NO: 88851 - DNA, 40 bp, Homo sapiens
gtcagattctcttgagccctgaggaaataagatgtagggc

SEQ ID NO: 88852 - DNA, 40 bp, Homo sapiens
ccctacatcttatttcctcagggctcaagagaatctgaca

SEQ ID NO: 88853 - DNA, 40 bp, Homo sapiens
tgtcagattctcttgagccctgaggaaataagatgtaggg

SEQ ID NO: 88854 - DNA, 40 bp, Homo sapiens
cctacatcttatttcctcagggctcaagagaatctgacag

SEQ ID NO: 88855 - DNA, 40 bp, Homo sapiens
ctgtcagattctcttgagccctgaggaaataagatgtagg

SEQ ID NO: 88856 - DNA, 40 bp, Homo sapiens
ctacatcttatttcctcagggctcaagagaatctgacaga

SEQ ID NO: 88857 - DNA, 40 bp, Homo sapiens
tctgtcagattctcttgagccctgaggaaataagatgtag

SEQ ID NO: 88858 - DNA, 40 bp, Homo sapiens
tacatcttatttcctcagggctcaagagaatctgacagat

SEQ ID NO: 88859 - DNA, 40 bp, Homo sapiens
atctgtcagattctcttgagccctgaggaaataagatgta

SEQ ID NO: 88860 - DNA, 40 bp, Homo sapiens
acatcttatttcctcagggctcaagagaatctgacagata

SEQ ID NO: 88861 - DNA, 40 bp, Homo sapiens
tatctgtcagattctcttgagccctgaggaaataagatgt

SEQ ID NO: 88862 - DNA, 40 bp, Homo sapiens
catcttatttcctcagggctcaagagaatctgacagatac

SEQ ID NO: 88863 - DNA, 40 bp, Homo sapiens
gtatctgtcagattctcttgagccctgaggaaataagatg

SEQ ID NO: 88864 - DNA, 40 bp, Homo sapiens
atcttatttcctcagggctcaagagaatctgacagatacc

SEQ ID NO: 88865 - DNA, 40 bp, Homo sapiens
ggtatctgtcagattctcttgagccctgaggaaataagat

SEQ ID NO: 88866 - DNA, 40 bp, Homo sapiens
tcttatttcctcagggctcaagagaatctgacagatacca

SEQ ID NO: 88867 - DNA, 40 bp, Homo sapiens
tggtatctgtcagattctcttgagccctgaggaaataaga

SEQ ID NO: 88868 - DNA, 40 bp, Homo sapiens
cttatttcctcagggctcaagagaatctgacagataccat

SEQ ID NO: 88869 - DNA, 40 bp, Homo sapiens
atggtatctgtcagattctcttgagccctgaggaaataag

SEQ ID NO: 88870 - DNA, 40 bp, Homo sapiens
ttatttcctcagggctcaagagaatctgacagataccata

SEQ ID NO: 88871 - DNA, 40 bp, Homo sapiens
tatggtatctgtcagattctcttgagccctgaggaaataa

SEQ ID NO: 88872 - DNA, 40 bp, Homo sapiens
tatttcctcagggctcaagagaatctgacagataccataa

SEQ ID NO: 88873 - DNA, 40 bp, Homo sapiens
ttatggtatctgtcagattctcttgagccctgaggaaata

SEQ ID NO: 88874 - DNA, 40 bp, Homo sapiens
atttcctcagggctcaagagaatctgacagataccataaa

SEQ ID NO: 88875 - DNA, 40 bp, Homo sapiens
tttatggtatctgtcagattctcttgagccctgaggaaat

SEQ ID NO: 88876 - DNA, 40 bp, Homo sapiens
tttcctcagggctcaagagaatctgacagataccataaag

SEQ ID NO: 88877 - DNA, 40 bp, Homo sapiens
ctttatggtatctgtcagattctcttgagccctgaggaaa

SEQ ID NO: 88878 - DNA, 40 bp, Homo sapiens
ttcctcagggctcaagagaatctgacagataccataaagg

SEQ ID NO: 88879 - DNA, 40 bp, Homo sapiens
cctttatggtatctgtcagattctcttgagccctgaggaa

SEQ ID NO: 88880 - DNA, 40 bp, Homo sapiens
tcctcagggctcaagagaatctgacagataccataaaggg

SEQ ID NO: 88881 - DNA, 40 bp, Homo sapiens
ccctttatggtatctgtcagattctcttgagccctgagga

SEQ ID NO: 88882 - DNA, 40 bp, Homo sapiens
cctcagggctcaagagaatctgacagataccataaaggga

SEQ ID NO: 88883 - DNA, 40 bp, Homo sapiens
tccctttatggtatctgtcagattctcttgagccctgagg

SEQ ID NO: 88884 - DNA, 40 bp, Homo sapiens
ctcagggctcaagagaatctgacagataccataaagggat

SEQ ID NO: 88885 - DNA, 40 bp, Homo sapiens
atccctttatggtatctgtcagattctcttgagccctgag

SEQ ID NO: 88886 - DNA, 40 bp, Homo sapiens
tcagggctcaagagaatctgacagataccataaagggatt

SEQ ID NO: 88887 - DNA, 40 bp, Homo sapiens
aatccctttatggtatctgtcagattctcttgagccctga

SEQ ID NO: 88888 - DNA, 40 bp, Homo sapiens
cagggctcaagagaatctgacagataccataaagggattt

SEQ ID NO: 88889 - DNA, 40 bp, Homo sapiens
aaatccctttatggtatctgtcagattctcttgagccctg

SEQ ID NO: 88890 - DNA, 40 bp, Homo sapiens
agggctcaagagaatctgacagataccataaagggatttg

SEQ ID NO: 88891 - DNA, 40 bp, Homo sapiens
caaatccctttatggtatctgtcagattctcttgagccct

SEQ ID NO: 88892 - DNA, 40 bp, Homo sapiens
gggctcaagagaatctgacagataccataaagggatttga

SEQ ID NO: 88893 - DNA, 40 bp, Homo sapiens
tcaaatccctttatggtatctgtcagattctcttgagccc

SEQ ID NO: 88894 - DNA, 40 bp, Homo sapiens
ggctcaagagaatctgacagataccataaagggatttgac

SEQ ID NO: 88895 - DNA, 40 bp, Homo sapiens
gtcaaatccctttatggtatctgtcagattctcttgagcc

SEQ ID NO: 88896 - DNA, 40 bp, Homo sapiens
gctcaagagaatctgacagataccataaagggatttgacc

SEQ ID NO: 88897 - DNA, 40 bp, Homo sapiens
ggtcaaatccctttatggtatctgtcagattctcttgagc

SEQ ID NO: 88898 - DNA, 40 bp, Homo sapiens
ctcaagagaatctgacagataccataaagggatttgacct

SEQ ID NO: 88899 - DNA, 40 bp, Homo sapiens
aggtcaaatccctttatggtatctgtcagattctcttgag

SEQ ID NO: 88900 - DNA, 40 bp, Homo sapiens
tcaagagaatctgacagataccataaagggatttgaccta

SEQ ID NO: 88901 - DNA, 40 bp, Homo sapiens
taggtcaaatccctttatggtatctgtcagattctcttga

SEQ ID NO: 88902 - DNA, 40 bp, Homo sapiens
caagagaatctgacagataccataaagggatttgacctaa

SEQ ID NO: 88903 - DNA, 40 bp, Homo sapiens
ttaggtcaaatccctttatggtatctgtcagattctcttg

SEQ ID NO: 88904 - DNA, 40 bp, Homo sapiens
aagagaatctgacagataccataaagggatttgacctaat

SEQ ID NO: 88905 - DNA, 40 bp, Homo sapiens
attaggtcaaatccctttatggtatctgtcagattctctt

SEQ ID NO: 88906 - DNA, 40 bp, Homo sapiens
agagaatctgacagataccataaagggatttgacctaatc

SEQ ID NO: 88907 - DNA, 40 bp, Homo sapiens
gattaggtcaaatccctttatggtatctgtcagattctct

SEQ ID NO: 88908 - DNA, 40 bp, Homo sapiens
gagaatctgacagataccataaagggatttgacctaatca

SEQ ID NO: 88909 - DNA, 40 bp, Homo sapiens
tgattaggtcaaatccctttatggtatctgtcagattctc

SEQ ID NO: 88910 - DNA, 40 bp, Homo sapiens
agaatctgacagataccataaagggatttgacctaatcac

SEQ ID NO: 88911 - DNA, 40 bp, Homo sapiens
gtgattaggtcaaatccctttatggtatctgtcagattct

SEQ ID NO: 88912 - DNA, 40 bp, Homo sapiens
gaatctgacagataccataaagggatttgacctaatcact

SEQ ID NO: 88913 - DNA, 40 bp, Homo sapiens
agtgattaggtcaaatccctttatggtatctgtcagattc

SEQ ID NO: 88914 - DNA, 40 bp, Homo sapiens
aatctgacagataccataaagggatttgacctaatcacta

SEQ ID NO: 88915 - DNA, 40 bp, Homo sapiens
tagtgattaggtcaaatccctttatggtatctgtcagatt

SEQ ID NO: 88916 - DNA, 40 bp, Homo sapiens
atctgacagataccataaagggatttgacctaatcactaa

SEQ ID NO: 88917 - DNA, 40 bp, Homo sapiens
ttagtgattaggtcaaatccctttatggtatctgtcagat

SEQ ID NO: 88918 - DNA, 40 bp, Homo sapiens
tctgacagataccataaagggatttgacctaatcactaat

SEQ ID NO: 88919 - DNA, 40 bp, Homo sapiens
attagtgattaggtcaaatccctttatggtatctgtcaga

SEQ ID NO: 88920 - DNA, 40 bp, Homo sapiens
ctgacagataccataaagggatttgacctaatcactaatt

SEQ ID NO: 88921 - DNA, 40 bp, Homo sapiens
aattagtgattaggtcaaatccctttatggtatctgtcag

SEQ ID NO: 88922 - DNA, 40 bp, Homo sapiens
tgacagataccataaagggatttgacctaatcactaattt

SEQ ID NO: 88923 - DNA, 40 bp, Homo sapiens
aaattagtgattaggtcaaatccctttatggtatctgtca

SEQ ID NO: 88924 - DNA, 40 bp, Homo sapiens
gacagataccataaagggatttgacctaatcactaatttt

SEQ ID NO: 88925 - DNA, 40 bp, Homo sapiens
aaaattagtgattaggtcaaatccctttatggtatctgtc

SEQ ID NO: 88926 - DNA, 40 bp, Homo sapiens
acagataccataaagggatttgacctaatcactaattttc

SEQ ID NO: 88927 - DNA, 40 bp, Homo sapiens
gaaaattagtgattaggtcaaatccctttatggtatctgt

SEQ ID NO: 88928 - DNA, 40 bp, Homo sapiens
cagataccataaagggatttgacctaatcactaattttca

SEQ ID NO: 88929 - DNA, 40 bp, Homo sapiens
tgaaaattagtgattaggtcaaatccctttatggtatctg

SEQ ID NO: 88930 - DNA, 40 bp, Homo sapiens
agataccataaagggatttgacctaatcactaattttcag

SEQ ID NO: 88931 - DNA, 40 bp, Homo sapiens
ctgaaaattagtgattaggtcaaatccctttatggtatct

SEQ ID NO: 88932 - DNA, 40 bp, Homo sapiens
gataccataaagggatttgacctaatcactaattttcagg

SEQ ID NO: 88933 - DNA, 40 bp, Homo sapiens
cctgaaaattagtgattaggtcaaatccctttatggtatc

SEQ ID NO: 88934 - DNA, 40 bp, Homo sapiens
ataccataaagggatttgacctaatcactaattttcaggt

SEQ ID NO: 88935 - DNA, 40 bp, Homo sapiens
acctgaaaattagtgattaggtcaaatccctttatggtat

SEQ ID NO: 88936 - DNA, 40 bp, Homo sapiens
taccataaagggatttgacctaatcactaattttcaggtg

SEQ ID NO: 88937 - DNA, 40 bp, Homo sapiens
cacctgaaaattagtgattaggtcaaatccctttatggta

SEQ ID NO: 88938 - DNA, 40 bp, Homo sapiens
accataaagggatttgacctaatcactaattttcaggtgg

SEQ ID NO: 88939 - DNA, 40 bp, Homo sapiens
ccacctgaaaattagtgattaggtcaaatccctttatggt

SEQ ID NO: 88940 - DNA, 40 bp, Homo sapiens
ccataaagggatttgacctaatcactaattttcaggtggt

SEQ ID NO: 88941 - DNA, 40 bp, Homo sapiens
accacctgaaaattagtgattaggtcaaatccctttatgg

SEQ ID NO: 88942 - DNA, 40 bp, Homo sapiens
cataaagggatttgacctaatcactaattttcaggtggtg

SEQ ID NO: 88943 - DNA, 40 bp, Homo sapiens
caccacctgaaaattagtgattaggtcaaatccctttatg

SEQ ID NO: 88944 - DNA, 40 bp, Homo sapiens
ataaagggatttgacctaatcactaattttcaggtggtgg

SEQ ID NO: 88945 - DNA, 40 bp, Homo sapiens
ccaccacctgaaaattagtgattaggtcaaatccctttat

SEQ ID NO: 88946 - DNA, 40 bp, Homo sapiens
taaagggatttgacctaatcactaattttcaggtggtggc

SEQ ID NO: 88947 - DNA, 40 bp, Homo sapiens
gccaccacctgaaaattagtgattaggtcaaatcccttta

SEQ ID NO: 88948 - DNA, 40 bp, Homo sapiens
aaagggatttgacctaatcactaattttcaggtggtggct

SEQ ID NO: 88949 - DNA, 40 bp, Homo sapiens
agccaccacctgaaaattagtgattaggtcaaatcccttt

SEQ ID NO: 88950 - DNA, 40 bp, Homo sapiens
aagggatttgacctaatcactaattttcaggtggtggctg

SEQ ID NO: 88951 - DNA, 40 bp, Homo sapiens
cagccaccacctgaaaattagtgattaggtcaaatccctt

SEQ ID NO: 88952 - DNA, 40 bp, Homo sapiens
agggatttgacctaatcactaattttcaggtggtggctga

SEQ ID NO: 88953 - DNA, 40 bp, Homo sapiens
tcagccaccacctgaaaattagtgattaggtcaaatccct

SEQ ID NO: 88954 - DNA, 40 bp, Homo sapiens
gggatttgacctaatcactaattttcaggtggtggctgat

SEQ ID NO: 88955 - DNA, 40 bp, Homo sapiens
atcagccaccacctgaaaattagtgattaggtcaaatccc

SEQ ID NO: 88956 - DNA, 40 bp, Homo sapiens
ggatttgacctaatcactaattttcaggtggtggctgatg

SEQ ID NO: 88957 - DNA, 40 bp, Homo sapiens
catcagccaccacctgaaaattagtgattaggtcaaatcc

SEQ ID NO: 88958 - DNA, 40 bp, Homo sapiens
gatttgacctaatcactaattttcaggtggtggctgatgc

SEQ ID NO: 88959 - DNA, 40 bp, Homo sapiens
gcatcagccaccacctgaaaattagtgattaggtcaaatc

SEQ ID NO: 88960 - DNA, 40 bp, Homo sapiens
atttgacctaatcactaattttcaggtggtggctgatgct

SEQ ID NO: 88961 - DNA, 40 bp, Homo sapiens
agcatcagccaccacctgaaaattagtgattaggtcaaat

SEQ ID NO: 88962 - DNA, 40 bp, Homo sapiens
tttgacctaatcactaattttcaggtggtggctgatgctt

SEQ ID NO: 88963 - DNA, 40 bp, Homo sapiens
aagcatcagccaccacctgaaaattagtgattaggtcaaa

SEQ ID NO: 88964 - DNA, 40 bp, Homo sapiens
ttgacctaatcactaattttcaggtggtggctgatgcttt

SEQ ID NO: 88965 - DNA, 40 bp, Homo sapiens
aaagcatcagccaccacctgaaaattagtgattaggtcaa

SEQ ID NO: 88966 - DNA, 40 bp, Homo sapiens
tgacctaatcactaattttcaggtggtggctgatgctttg

SEQ ID NO: 88967 - DNA, 40 bp, Homo sapiens
caaagcatcagccaccacctgaaaattagtgattaggtca

SEQ ID NO: 88968 - DNA, 40 bp, Homo sapiens
gacctaatcactaattttcaggtggtggctgatgctttga

SEQ ID NO: 88969 - DNA, 40 bp, Homo sapiens
tcaaagcatcagccaccacctgaaaattagtgattaggtc

SEQ ID NO: 88970 - DNA, 40 bp, Homo sapiens
acctaatcactaattttcaggtggtggctgatgctttgaa

SEQ ID NO: 88971 - DNA, 40 bp, Homo sapiens
ttcaaagcatcagccaccacctgaaaattagtgattaggt

SEQ ID NO: 88972 - DNA, 40 bp, Homo sapiens
cctaatcactaattttcaggtggtggctgatgctttgaac

SEQ ID NO: 88973 - DNA, 40 bp, Homo sapiens
gttcaaagcatcagccaccacctgaaaattagtgattagg

SEQ ID NO: 88974 - DNA, 40 bp, Homo sapiens
ctaatcactaattttcaggtggtggctgatgctttgaaca

SEQ ID NO: 88975 - DNA, 40 bp, Homo sapiens
tgttcaaagcatcagccaccacctgaaaattagtgattag

SEQ ID NO: 88976 - DNA, 40 bp, Homo sapiens
taatcactaattttcaggtggtggctgatgctttgaacat

SEQ ID NO: 88977 - DNA, 40 bp, Homo sapiens
atgttcaaagcatcagccaccacctgaaaattagtgatta

SEQ ID NO: 88978 - DNA, 40 bp, Homo sapiens
aatcactaattttcaggtggtggctgatgctttgaacatc

SEQ ID NO: 88979 - DNA, 40 bp, Homo sapiens
gatgttcaaagcatcagccaccacctgaaaattagtgatt

SEQ ID NO: 88980 - DNA, 40 bp, Homo sapiens
atcactaattttcaggtggtggctgatgctttgaacatct

SEQ ID NO: 88981 - DNA, 40 bp, Homo sapiens
agatgttcaaagcatcagccaccacctgaaaattagtgat

SEQ ID NO: 88982 - DNA, 40 bp, Homo sapiens
tcactaattttcaggtggtggctgatgctttgaacatctc

SEQ ID NO: 88983 - DNA, 40 bp, Homo sapiens
gagatgttcaaagcatcagccaccacctgaaaattagtga

SEQ ID NO: 88984 - DNA, 40 bp, Homo sapiens
cactaattttcaggtggtggctgatgctttgaacatctct

SEQ ID NO: 88985 - DNA, 40 bp, Homo sapiens
agagatgttcaaagcatcagccaccacctgaaaattagtg

SEQ ID NO: 88986 - DNA, 40 bp, Homo sapiens
actaattttcaggtggtggctgatgctttgaacatctctt

SEQ ID NO: 88987 - DNA, 40 bp, Homo sapiens
aagagatgttcaaagcatcagccaccacctgaaaattagt

SEQ ID NO: 88988 - DNA, 40 bp, Homo sapiens
ctaattttcaggtggtggctgatgctttgaacatctcttt

SEQ ID NO: 88989 - DNA, 40 bp, Homo sapiens
aaagagatgttcaaagcatcagccaccacctgaaaattag

SEQ ID NO: 88990 - DNA, 40 bp, Homo sapiens
taattttcaggtggtggctgatgctttgaacatctctttg

SEQ ID NO: 88991 - DNA, 40 bp, Homo sapiens
caaagagatgttcaaagcatcagccaccacctgaaaatta

SEQ ID NO: 88992 - DNA, 40 bp, Homo sapiens
aattttcaggtggtggctgatgctttgaacatctctttgc

SEQ ID NO: 88993 - DNA, 40 bp, Homo sapiens
gcaaagagatgttcaaagcatcagccaccacctgaaaatt

SEQ ID NO: 88994 - DNA, 40 bp, Homo sapiens
attttcaggtggtggctgatgctttgaacatctctttgct

SEQ ID NO: 88995 - DNA, 40 bp, Homo sapiens
agcaaagagatgttcaaagcatcagccaccacctgaaaat

SEQ ID NO: 88996 - DNA, 40 bp, Homo sapiens
ttttcaggtggtggctgatgctttgaacatctctttgctg

SEQ ID NO: 88997 - DNA, 40 bp, Homo sapiens
cagcaaagagatgttcaaagcatcagccaccacctgaaaa

SEQ ID NO: 88998 - DNA, 40 bp, Homo sapiens
tttcaggtggtggctgatgctttgaacatctctttgctgc

SEQ ID NO: 88999 - DNA, 40 bp, Homo sapiens
gcagcaaagagatgttcaaagcatcagccaccacctgaaa

SEQ ID NO: 89000 - DNA, 40 bp, Homo sapiens
ttcaggtggtggctgatgctttgaacatctctttgctgcc

SEQ ID NO: 89001 - DNA, 40 bp, Homo sapiens
ggcagcaaagagatgttcaaagcatcagccaccacctgaa

SEQ ID NO: 89002 - DNA, 40 bp, Homo sapiens
tcaggtggtggctgatgctttgaacatctctttgctgccc

SEQ ID NO: 89003 - DNA, 40 bp, Homo sapiens
gggcagcaaagagatgttcaaagcatcagccaccacctga

SEQ ID NO: 89004 - DNA, 40 bp, Homo sapiens
caggtggtggctgatgctttgaacatctctttgctgccca

SEQ ID NO: 89005 - DNA, 40 bp, Homo sapiens
tgggcagcaaagagatgttcaaagcatcagccaccacctg

SEQ ID NO: 89006 - DNA, 40 bp, Homo sapiens
aggtggtggctgatgctttgaacatctctttgctgcccaa

SEQ ID NO: 89007 - DNA, 40 bp, Homo sapiens
ttgggcagcaaagagatgttcaaagcatcagccaccacct

SEQ ID NO: 89008 - DNA, 40 bp, Homo sapiens
ggtggtggctgatgctttgaacatctctttgctgcccaat

SEQ ID NO: 89009 - DNA, 40 bp, Homo sapiens
attgggcagcaaagagatgttcaaagcatcagccaccacc

SEQ ID NO: 89010 - DNA, 40 bp, Homo sapiens
gtggtggctgatgctttgaacatctctttgctgcccaatc

SEQ ID NO: 89011 - DNA, 40 bp, Homo sapiens
gattgggcagcaaagagatgttcaaagcatcagccaccac

SEQ ID NO: 89012 - DNA, 40 bp, Homo sapiens
tggtggctgatgctttgaacatctctttgctgcccaatcc

SEQ ID NO: 89013 - DNA, 40 bp, Homo sapiens
ggattgggcagcaaagagatgttcaaagcatcagccacca

SEQ ID NO: 89014 - DNA, 40 bp, Homo sapiens
ggtggctgatgctttgaacatctctttgctgcccaatcca

SEQ ID NO: 89015 - DNA, 40 bp, Homo sapiens
tggattgggcagcaaagagatgttcaaagcatcagccacc

SEQ ID NO: 89016 - DNA, 40 bp, Homo sapiens
gtggctgatgctttgaacatctctttgctgcccaatccat

SEQ ID NO: 89017 - DNA, 40 bp, Homo sapiens
atggattgggcagcaaagagatgttcaaagcatcagccac

SEQ ID NO: 89018 - DNA, 40 bp, Homo sapiens
tggctgatgctttgaacatctctttgctgcccaatccatt

SEQ ID NO: 89019 - DNA, 40 bp, Homo sapiens
aatggattgggcagcaaagagatgttcaaagcatcagcca

SEQ ID NO: 89020 - DNA, 40 bp, Homo sapiens
ggctgatgctttgaacatctctttgctgcccaatccatta

SEQ ID NO: 89021 - DNA, 40 bp, Homo sapiens
taatggattgggcagcaaagagatgttcaaagcatcagcc

SEQ ID NO: 89022 - DNA, 40 bp, Homo sapiens
gctgatgctttgaacatctctttgctgcccaatccattag

SEQ ID NO: 89023 - DNA, 40 bp, Homo sapiens
ctaatggattgggcagcaaagagatgttcaaagcatcagc

SEQ ID NO: 89024 - DNA, 40 bp, Homo sapiens
ctgatgctttgaacatctctttgctgcccaatccattagc

SEQ ID NO: 89025 - DNA, 40 bp, Homo sapiens
gctaatggattgggcagcaaagagatgttcaaagcatcag

SEQ ID NO: 89026 - DNA, 40 bp, Homo sapiens
tgatgctttgaacatctctttgctgcccaatccattagcg

SEQ ID NO: 89027 - DNA, 40 bp, Homo sapiens
cgctaatggattgggcagcaaagagatgttcaaagcatca

SEQ ID NO: 89028 - DNA, 40 bp, Homo sapiens
gatgctttgaacatctctttgctgcccaatccattagcga

SEQ ID NO: 89029 - DNA, 40 bp, Homo sapiens
tcgctaatggattgggcagcaaagagatgttcaaagcatc

SEQ ID NO: 89030 - DNA, 40 bp, Homo sapiens
atgctttgaacatctctttgctgcccaatccattagcgac

SEQ ID NO: 89031 - DNA, 40 bp, Homo sapiens
gtcgctaatggattgggcagcaaagagatgttcaaagcat

SEQ ID NO: 89032 - DNA, 40 bp, Homo sapiens
tgctttgaacatctctttgctgcccaatccattagcgaca

SEQ ID NO: 89033 - DNA, 40 bp, Homo sapiens
tgtcgctaatggattgggcagcaaagagatgttcaaagca

SEQ ID NO: 89034 - DNA, 40 bp, Homo sapiens
gctttgaacatctctttgctgcccaatccattagcgacag

SEQ ID NO: 89035 - DNA, 40 bp, Homo sapiens
ctgtcgctaatggattgggcagcaaagagatgttcaaagc

SEQ ID NO: 89036 - DNA, 40 bp, Homo sapiens
ctttgaacatctctttgctgcccaatccattagcgacagt

SEQ ID NO: 89037 - DNA, 40 bp, Homo sapiens
actgtcgctaatggattgggcagcaaagagatgttcaaag

SEQ ID NO: 89038 - DNA, 40 bp, Homo sapiens
tttgaacatctctttgctgcccaatccattagcgacagta

SEQ ID NO: 89039 - DNA, 40 bp, Homo sapiens
tactgtcgctaatggattgggcagcaaagagatgttcaaa

SEQ ID NO: 89040 - DNA, 40 bp, Homo sapiens
ttgaacatctctttgctgcccaatccattagcgacagtag

SEQ ID NO: 89041 - DNA, 40 bp, Homo sapiens
ctactgtcgctaatggattgggcagcaaagagatgttcaa

SEQ ID NO: 89042 - DNA, 40 bp, Homo sapiens
tgaacatctctttgctgcccaatccattagcgacagtagg

SEQ ID NO: 89043 - DNA, 40 bp, Homo sapiens
cctactgtcgctaatggattgggcagcaaagagatgttca

SEQ ID NO: 89044 - DNA, 40 bp, Homo sapiens
gaacatctctttgctgcccaatccattagcgacagtagga

SEQ ID NO: 89045 - DNA, 40 bp, Homo sapiens
tcctactgtcgctaatggattgggcagcaaagagatgttc

SEQ ID NO: 89046 - DNA, 40 bp, Homo sapiens
aacatctctttgctgcccaatccattagcgacagtaggat

SEQ ID NO: 89047 - DNA, 40 bp, Homo sapiens
atcctactgtcgctaatggattgggcagcaaagagatgtt

SEQ ID NO: 89048 - DNA, 40 bp, Homo sapiens
acatctctttgctgcccaatccattagcgacagtaggatt

SEQ ID NO: 89049 - DNA, 40 bp, Homo sapiens
aatcctactgtcgctaatggattgggcagcaaagagatgt

SEQ ID NO: 89050 - DNA, 40 bp, Homo sapiens
catctctttgctgcccaatccattagcgacagtaggattt

SEQ ID NO: 89051 - DNA, 40 bp, Homo sapiens
aaatcctactgtcgctaatggattgggcagcaaagagatg

SEQ ID NO: 89052 - DNA, 40 bp, Homo sapiens
atctctttgctgcccaatccattagcgacagtaggatttt

SEQ ID NO: 89053 - DNA, 40 bp, Homo sapiens
aaaatcctactgtcgctaatggattgggcagcaaagagat

SEQ ID NO: 89054 - DNA, 40 bp, Homo sapiens
tctctttgctgcccaatccattagcgacagtaggattttt

SEQ ID NO: 89055 - DNA, 40 bp, Homo sapiens
aaaaatcctactgtcgctaatggattgggcagcaaagaga

SEQ ID NO: 89056 - DNA, 40 bp, Homo sapiens
ctctttgctgcccaatccattagcgacagtaggatttttc

SEQ ID NO: 89057 - DNA, 40 bp, Homo sapiens
gaaaaatcctactgtcgctaatggattgggcagcaaagag

SEQ ID NO: 89058 - DNA, 40 bp, Homo sapiens
tctttgctgcccaatccattagcgacagtaggatttttca

SEQ ID NO: 89059 - DNA, 40 bp, Homo sapiens
tgaaaaatcctactgtcgctaatggattgggcagcaaaga

SEQ ID NO: 89060 - DNA, 40 bp, Homo sapiens
ctttgctgcccaatccattagcgacagtaggatttttcaa

SEQ ID NO: 89061 - DNA, 40 bp, Homo sapiens
ttgaaaaatcctactgtcgctaatggattgggcagcaaag

SEQ ID NO: 89062 - DNA, 40 bp, Homo sapiens
tttgctgcccaatccattagcgacagtaggatttttcaaa

SEQ ID NO: 89063 - DNA, 40 bp, Homo sapiens
tttgaaaaatcctactgtcgctaatggattgggcagcaaa

SEQ ID NO: 89064 - DNA, 40 bp, Homo sapiens
ttgctgcccaatccattagcgacagtaggatttttcaaac

SEQ ID NO: 89065 - DNA, 40 bp, Homo sapiens
gtttgaaaaatcctactgtcgctaatggattgggcagcaa

SEQ ID NO: 89066 - DNA, 40 bp, Homo sapiens
tgctgcccaatccattagcgacagtaggatttttcaaacc

SEQ ID NO: 89067 - DNA, 40 bp, Homo sapiens
ggtttgaaaaatcctactgtcgctaatggattgggcagca

SEQ ID NO: 89068 - DNA, 40 bp, Homo sapiens
gctgcccaatccattagcgacagtaggatttttcaaacct

SEQ ID NO: 89069 - DNA, 40 bp, Homo sapiens
aggtttgaaaaatcctactgtcgctaatggattgggcagc

SEQ ID NO: 89070 - DNA, 40 bp, Homo sapiens
ctgcccaatccattagcgacagtaggatttttcaaacctg

SEQ ID NO: 89071 - DNA, 40 bp, Homo sapiens
caggtttgaaaaatcctactgtcgctaatggattgggcag

SEQ ID NO: 89072 - DNA, 40 bp, Homo sapiens
tgcccaatccattagcgacagtaggatttttcaaacctgg

SEQ ID NO: 89073 - DNA, 40 bp, Homo sapiens
ccaggtttgaaaaatcctactgtcgctaatggattgggca

SEQ ID NO: 89074 - DNA, 40 bp, Homo sapiens
gcccaatccattagcgacagtaggatttttcaaacctggt

SEQ ID NO: 89075 - DNA, 40 bp, Homo sapiens
accaggtttgaaaaatcctactgtcgctaatggattgggc

SEQ ID NO: 89076 - DNA, 40 bp, Homo sapiens
cccaatccattagcgacagtaggatttttcaaacctggta

SEQ ID NO: 89077 - DNA, 40 bp, Homo sapiens
taccaggtttgaaaaatcctactgtcgctaatggattggg

SEQ ID NO: 89078 - DNA, 40 bp, Homo sapiens
ccaatccattagcgacagtaggatttttcaaacctggtat

SEQ ID NO: 89079 - DNA, 40 bp, Homo sapiens
ataccaggtttgaaaaatcctactgtcgctaatggattgg

SEQ ID NO: 89080 - DNA, 40 bp, Homo sapiens
caatccattagcgacagtaggatttttcaaacctggtatg

SEQ ID NO: 89081 - DNA, 40 bp, Homo sapiens
cataccaggtttgaaaaatcctactgtcgctaatggattg

SEQ ID NO: 89082 - DNA, 40 bp, Homo sapiens
aatccattagcgacagtaggatttttcaaacctggtatga

SEQ ID NO: 89083 - DNA, 40 bp, Homo sapiens
tcataccaggtttgaaaaatcctactgtcgctaatggatt

SEQ ID NO: 89084 - DNA, 40 bp, Homo sapiens
atccattagcgacagtaggatttttcaaacctggtatgaa

SEQ ID NO: 89085 - DNA, 40 bp, Homo sapiens
ttcataccaggtttgaaaaatcctactgtcgctaatggat

SEQ ID NO: 89086 - DNA, 40 bp, Homo sapiens
tccattagcgacagtaggatttttcaaacctggtatgaat

SEQ ID NO: 89087 - DNA, 40 bp, Homo sapiens
attcataccaggtttgaaaaatcctactgtcgctaatgga

SEQ ID NO: 89088 - DNA, 40 bp, Homo sapiens
ccattagcgacagtaggatttttcaaacctggtatgaata

SEQ ID NO: 89089 - DNA, 40 bp, Homo sapiens
tattcataccaggtttgaaaaatcctactgtcgctaatgg

SEQ ID NO: 89090 - DNA, 40 bp, Homo sapiens
cattagcgacagtaggatttttcaaacctggtatgaatag

SEQ ID NO: 89091 - DNA, 40 bp, Homo sapiens
ctattcataccaggtttgaaaaatcctactgtcgctaatg

SEQ ID NO: 89092 - DNA, 40 bp, Homo sapiens
attagcgacagtaggatttttcaaacctggtatgaataga

SEQ ID NO: 89093 - DNA, 40 bp, Homo sapiens
tctattcataccaggtttgaaaaatcctactgtcgctaat

SEQ ID NO: 89094 - DNA, 40 bp, Homo sapiens
ttagcgacagtaggatttttcaaacctggtatgaatagac

SEQ ID NO: 89095 - DNA, 40 bp, Homo sapiens
gtctattcataccaggtttgaaaaatcctactgtcgctaa

SEQ ID NO: 89096 - DNA, 40 bp, Homo sapiens
tagcgacagtaggatttttcaaacctggtatgaatagaca

SEQ ID NO: 89097 - DNA, 40 bp, Homo sapiens
tgtctattcataccaggtttgaaaaatcctactgtcgcta

SEQ ID NO: 89098 - DNA, 40 bp, Homo sapiens
agcgacagtaggatttttcaaacctggtatgaatagacag

SEQ ID NO: 89099 - DNA, 40 bp, Homo sapiens
ctgtctattcataccaggtttgaaaaatcctactgtcgct

SEQ ID NO: 89100 - DNA, 40 bp, Homo sapiens
gcgacagtaggatttttcaaacctggtatgaatagacaga

SEQ ID NO: 89101 - DNA, 40 bp, Homo sapiens
tctgtctattcataccaggtttgaaaaatcctactgtcgc

SEQ ID NO: 89102 - DNA, 40 bp, Homo sapiens
cgacagtaggatttttcaaacctggtatgaatagacagaa

SEQ ID NO: 89103 - DNA, 40 bp, Homo sapiens
ttctgtctattcataccaggtttgaaaaatcctactgtcg

SEQ ID NO: 89104 - DNA, 40 bp, Homo sapiens
gacagtaggatttttcaaacctggtatgaatagacagaac

SEQ ID NO: 89105 - DNA, 40 bp, Homo sapiens
gttctgtctattcataccaggtttgaaaaatcctactgtc

SEQ ID NO: 89106 - DNA, 40 bp, Homo sapiens
acagtaggatttttcaaacctggtatgaatagacagaacc

SEQ ID NO: 89107 - DNA, 40 bp, Homo sapiens
ggttctgtctattcataccaggtttgaaaaatcctactgt

SEQ ID NO: 89108 - DNA, 40 bp, Homo sapiens
cagtaggatttttcaaacctggtatgaatagacagaaccc

SEQ ID NO: 89109 - DNA, 40 bp, Homo sapiens
gggttctgtctattcataccaggtttgaaaaatcctactg

SEQ ID NO: 89110 - DNA, 40 bp, Homo sapiens
agtaggatttttcaaacctggtatgaatagacagaaccct

SEQ ID NO: 89111 - DNA, 40 bp, Homo sapiens
agggttctgtctattcataccaggtttgaaaaatcctact

SEQ ID NO: 89112 - DNA, 40 bp, Homo sapiens
gtaggatttttcaaacctggtatgaatagacagaacccta

SEQ ID NO: 89113 - DNA, 40 bp, Homo sapiens
tagggttctgtctattcataccaggtttgaaaaatcctac

SEQ ID NO: 89114 - DNA, 40 bp, Homo sapiens
taggatttttcaaacctggtatgaatagacagaaccctat

SEQ ID NO: 89115 - DNA, 40 bp, Homo sapiens
atagggttctgtctattcataccaggtttgaaaaatccta

SEQ ID NO: 89116 - DNA, 40 bp, Homo sapiens
aggatttttcaaacctggtatgaatagacagaaccctatc

SEQ ID NO: 89117 - DNA, 40 bp, Homo sapiens
gatagggttctgtctattcataccaggtttgaaaaatcct

SEQ ID NO: 89118 - DNA, 40 bp, Homo sapiens
ggatttttcaaacctggtatgaatagacagaaccctatcc

SEQ ID NO: 89119 - DNA, 40 bp, Homo sapiens
ggatagggttctgtctattcataccaggtttgaaaaatcc

SEQ ID NO: 89120 - DNA, 40 bp, Homo sapiens
gatttttcaaacctggtatgaatagacagaaccctatcca

SEQ ID NO: 89121 - DNA, 40 bp, Homo sapiens
tggatagggttctgtctattcataccaggtttgaaaaatc

SEQ ID NO: 89122 - DNA, 40 bp, Homo sapiens
atttttcaaacctggtatgaatagacagaaccctatccag

SEQ ID NO: 89123 - DNA, 40 bp, Homo sapiens
ctggatagggttctgtctattcataccaggtttgaaaaat

SEQ ID NO: 89124 - DNA, 40 bp, Homo sapiens
tttttcaaacctggtatgaatagacagaaccctatccagt

SEQ ID NO: 89125 - DNA, 40 bp, Homo sapiens
actggatagggttctgtctattcataccaggtttgaaaaa

SEQ ID NO: 89126 - DNA, 40 bp, Homo sapiens
ttttcaaacctggtatgaatagacagaaccctatccagtg

SEQ ID NO: 89127 - DNA, 40 bp, Homo sapiens
cactggatagggttctgtctattcataccaggtttgaaaa

SEQ ID NO: 89128 - DNA, 40 bp, Homo sapiens
tttcaaacctggtatgaatagacagaaccctatccagtgg

SEQ ID NO: 89129 - DNA, 40 bp, Homo sapiens
ccactggatagggttctgtctattcataccaggtttgaaa

SEQ ID NO: 89130 - DNA, 40 bp, Homo sapiens
ttcaaacctggtatgaatagacagaaccctatccagtgga

SEQ ID NO: 89131 - DNA, 40 bp, Homo sapiens
tccactggatagggttctgtctattcataccaggtttgaa

SEQ ID NO: 89132 - DNA, 40 bp, Homo sapiens
tcaaacctggtatgaatagacagaaccctatccagtggaa

SEQ ID NO: 89133 - DNA, 40 bp, Homo sapiens
ttccactggatagggttctgtctattcataccaggtttga

SEQ ID NO: 89134 - DNA, 40 bp, Homo sapiens
caaacctggtatgaatagacagaaccctatccagtggaag

SEQ ID NO: 89135 - DNA, 40 bp, Homo sapiens
cttccactggatagggttctgtctattcataccaggtttg

SEQ ID NO: 89136 - DNA, 40 bp, Homo sapiens
aaacctggtatgaatagacagaaccctatccagtggaagg

SEQ ID NO: 89137 - DNA, 40 bp, Homo sapiens
ccttccactggatagggttctgtctattcataccaggttt

SEQ ID NO: 89138 - DNA, 40 bp, Homo sapiens
aacctggtatgaatagacagaaccctatccagtggaagga

SEQ ID NO: 89139 - DNA, 40 bp, Homo sapiens
tccttccactggatagggttctgtctattcataccaggtt

SEQ ID NO: 89140 - DNA, 40 bp, Homo sapiens
acctggtatgaatagacagaaccctatccagtggaaggag

SEQ ID NO: 89141 - DNA, 40 bp, Homo sapiens
ctccttccactggatagggttctgtctattcataccaggt

SEQ ID NO: 89142 - DNA, 40 bp, Homo sapiens
cctggtatgaatagacagaaccctatccagtggaaggaga

SEQ ID NO: 89143 - DNA, 40 bp, Homo sapiens
tctccttccactggatagggttctgtctattcataccagg

SEQ ID NO: 89144 - DNA, 40 bp, Homo sapiens
ctggtatgaatagacagaaccctatccagtggaaggagaa

SEQ ID NO: 89145 - DNA, 40 bp, Homo sapiens
ttctccttccactggatagggttctgtctattcataccag

SEQ ID NO: 89146 - DNA, 40 bp, Homo sapiens
tggtatgaatagacagaaccctatccagtggaaggagaat

SEQ ID NO: 89147 - DNA, 40 bp, Homo sapiens
attctccttccactggatagggttctgtctattcatacca

SEQ ID NO: 89148 - DNA, 40 bp, Homo sapiens
ggtatgaatagacagaaccctatccagtggaaggagaatt

SEQ ID NO: 89149 - DNA, 40 bp, Homo sapiens
aattctccttccactggatagggttctgtctattcatacc

SEQ ID NO: 89150 - DNA, 40 bp, Homo sapiens
gtatgaatagacagaaccctatccagtggaaggagaattt

SEQ ID NO: 89151 - DNA, 40 bp, Homo sapiens
aaattctccttccactggatagggttctgtctattcatac

SEQ ID NO: 89152 - DNA, 40 bp, Homo sapiens
tatgaatagacagaaccctatccagtggaaggagaattta

SEQ ID NO: 89153 - DNA, 40 bp, Homo sapiens
taaattctccttccactggatagggttctgtctattcata

SEQ ID NO: 89154 - DNA, 40 bp, Homo sapiens
atgaatagacagaaccctatccagtggaaggagaatttaa

SEQ ID NO: 89155 - DNA, 40 bp, Homo sapiens
ttaaattctccttccactggatagggttctgtctattcat

SEQ ID NO: 89156 - DNA, 40 bp, Homo sapiens
tgaatagacagaaccctatccagtggaaggagaatttaat

SEQ ID NO: 89157 - DNA, 40 bp, Homo sapiens
attaaattctccttccactggatagggttctgtctattca

SEQ ID NO: 89158 - DNA, 40 bp, Homo sapiens
gaatagacagaaccctatccagtggaaggagaatttaata

SEQ ID NO: 89159 - DNA, 40 bp, Homo sapiens
tattaaattctccttccactggatagggttctgtctattc

SEQ ID NO: 89160 - DNA, 40 bp, Homo sapiens
aatagacagaaccctatccagtggaaggagaatttaataa

SEQ ID NO: 89161 - DNA, 40 bp, Homo sapiens
ttattaaattctccttccactggatagggttctgtctatt

SEQ ID NO: 89162 - DNA, 40 bp, Homo sapiens
atagacagaaccctatccagtggaaggagaatttaataaa

SEQ ID NO: 89163 - DNA, 40 bp, Homo sapiens
tttattaaattctccttccactggatagggttctgtctat

SEQ ID NO: 89164 - DNA, 40 bp, Homo sapiens
tagacagaaccctatccagtggaaggagaatttaataaag

SEQ ID NO: 89165 - DNA, 40 bp, Homo sapiens
ctttattaaattctccttccactggatagggttctgtcta

SEQ ID NO: 89166 - DNA, 40 bp, Homo sapiens
agacagaaccctatccagtggaaggagaatttaataaaga

SEQ ID NO: 89167 - DNA, 40 bp, Homo sapiens
tctttattaaattctccttccactggatagggttctgtct

SEQ ID NO: 89168 - DNA, 40 bp, Homo sapiens
gacagaaccctatccagtggaaggagaatttaataaagat

SEQ ID NO: 89169 - DNA, 40 bp, Homo sapiens
atctttattaaattctccttccactggatagggttctgtc

SEQ ID NO: 89170 - DNA, 40 bp, Homo sapiens
acagaaccctatccagtggaaggagaatttaataaagata

SEQ ID NO: 89171 - DNA, 40 bp, Homo sapiens
tatctttattaaattctccttccactggatagggttctgt

SEQ ID NO: 89172 - DNA, 40 bp, Homo sapiens
cagaaccctatccagtggaaggagaatttaataaagatag

SEQ ID NO: 89173 - DNA, 40 bp, Homo sapiens
ctatctttattaaattctccttccactggatagggttctg

SEQ ID NO: 89174 - DNA, 40 bp, Homo sapiens
agaaccctatccagtggaaggagaatttaataaagatagt

SEQ ID NO: 89175 - DNA, 40 bp, Homo sapiens
actatctttattaaattctccttccactggatagggttct

SEQ ID NO: 89176 - DNA, 40 bp, Homo sapiens
gaaccctatccagtggaaggagaatttaataaagatagtg

SEQ ID NO: 89177 - DNA, 40 bp, Homo sapiens
cactatctttattaaattctccttccactggatagggttc

SEQ ID NO: 89178 - DNA, 40 bp, Homo sapiens
aaccctatccagtggaaggagaatttaataaagatagtgc

SEQ ID NO: 89179 - DNA, 40 bp, Homo sapiens
gcactatctttattaaattctccttccactggatagggtt

SEQ ID NO: 89180 - DNA, 40 bp, Homo sapiens
accctatccagtggaaggagaatttaataaagatagtgct

SEQ ID NO: 89181 - DNA, 40 bp, Homo sapiens
agcactatctttattaaattctccttccactggatagggt

SEQ ID NO: 89182 - DNA, 40 bp, Homo sapiens
ccctatccagtggaaggagaatttaataaagatagtgctg

SEQ ID NO: 89183 - DNA, 40 bp, Homo sapiens
cagcactatctttattaaattctccttccactggataggg

SEQ ID NO: 89184 - DNA, 40 bp, Homo sapiens
cctatccagtggaaggagaatttaataaagatagtgctga

SEQ ID NO: 89185 - DNA, 40 bp, Homo sapiens
tcagcactatctttattaaattctccttccactggatagg

SEQ ID NO: 89186 - DNA, 40 bp, Homo sapiens
ctatccagtggaaggagaatttaataaagatagtgctgaa

SEQ ID NO: 89187 - DNA, 40 bp, Homo sapiens
ttcagcactatctttattaaattctccttccactggatag

SEQ ID NO: 89188 - DNA, 40 bp, Homo sapiens
tatccagtggaaggagaatttaataaagatagtgctgaaa

SEQ ID NO: 89189 - DNA, 40 bp, Homo sapiens
tttcagcactatctttattaaattctccttccactggata

SEQ ID NO: 89190 - DNA, 40 bp, Homo sapiens
atccagtggaaggagaatttaataaagatagtgctgaaag

SEQ ID NO: 89191 - DNA, 40 bp, Homo sapiens
ctttcagcactatctttattaaattctccttccactggat

SEQ ID NO: 89192 - DNA, 40 bp, Homo sapiens
tccagtggaaggagaatttaataaagatagtgctgaaaga

SEQ ID NO: 89193 - DNA, 40 bp, Homo sapiens
tctttcagcactatctttattaaattctccttccactgga

SEQ ID NO: 89194 - DNA, 40 bp, Homo sapiens
ccagtggaaggagaatttaataaagatagtgctgaaagaa

SEQ ID NO: 89195 - DNA, 40 bp, Homo sapiens
ttctttcagcactatctttattaaattctccttccactgg

SEQ ID NO: 89196 - DNA, 40 bp, Homo sapiens
cagtggaaggagaatttaataaagatagtgctgaaagaat

SEQ ID NO: 89197 - DNA, 40 bp, Homo sapiens
attctttcagcactatctttattaaattctccttccactg

SEQ ID NO: 89198 - DNA, 40 bp, Homo sapiens
agtggaaggagaatttaataaagatagtgctgaaagaatt

SEQ ID NO: 89199 - DNA, 40 bp, Homo sapiens
aattctttcagcactatctttattaaattctccttccact

SEQ ID NO: 89200 - DNA, 40 bp, Homo sapiens
gtggaaggagaatttaataaagatagtgctgaaagaattc

SEQ ID NO: 89201 - DNA, 40 bp, Homo sapiens
gaattctttcagcactatctttattaaattctccttccac

SEQ ID NO: 89202 - DNA, 40 bp, Homo sapiens
tggaaggagaatttaataaagatagtgctgaaagaattcc

SEQ ID NO: 89203 - DNA, 40 bp, Homo sapiens
ggaattctttcagcactatctttattaaattctccttcca

SEQ ID NO: 89204 - DNA, 40 bp, Homo sapiens
ggaaggagaatttaataaagatagtgctgaaagaattcct

SEQ ID NO: 89205 - DNA, 40 bp, Homo sapiens
aggaattctttcagcactatctttattaaattctccttcc

SEQ ID NO: 89206 - DNA, 40 bp, Homo sapiens
gaaggagaatttaataaagatagtgctgaaagaattcctt

SEQ ID NO: 89207 - DNA, 40 bp, Homo sapiens
aaggaattctttcagcactatctttattaaattctccttc

SEQ ID NO: 89208 - DNA, 40 bp, Homo sapiens
aaggagaatttaataaagatagtgctgaaagaattcctta

SEQ ID NO: 89209 - DNA, 40 bp, Homo sapiens
taaggaattctttcagcactatctttattaaattctcctt

SEQ ID NO: 89210 - DNA, 40 bp, Homo sapiens
aggagaatttaataaagatagtgctgaaagaattccttag

SEQ ID NO: 89211 - DNA, 40 bp, Homo sapiens
ctaaggaattctttcagcactatctttattaaattctcct

SEQ ID NO: 89212 - DNA, 40 bp, Homo sapiens
ggagaatttaataaagatagtgctgaaagaattccttagg

SEQ ID NO: 89213 - DNA, 40 bp, Homo sapiens
cctaaggaattctttcagcactatctttattaaattctcc

SEQ ID NO: 89214 - DNA, 40 bp, Homo sapiens
gagaatttaataaagatagtgctgaaagaattccttaggt

SEQ ID NO: 89215 - DNA, 40 bp, Homo sapiens
acctaaggaattctttcagcactatctttattaaattctc

SEQ ID NO: 89216 - DNA, 40 bp, Homo sapiens
agaatttaataaagatagtgctgaaagaattccttaggta

SEQ ID NO: 89217 - DNA, 40 bp, Homo sapiens
tacctaaggaattctttcagcactatctttattaaattct

SEQ ID NO: 89218 - DNA, 40 bp, Homo sapiens
gaatttaataaagatagtgctgaaagaattccttaggtaa

SEQ ID NO: 89219 - DNA, 40 bp, Homo sapiens
ttacctaaggaattctttcagcactatctttattaaattc

SEQ ID NO: 89220 - DNA, 40 bp, Homo sapiens
aatttaataaagatagtgctgaaagaattccttaggtaat

SEQ ID NO: 89221 - DNA, 40 bp, Homo sapiens
attacctaaggaattctttcagcactatctttattaaatt

SEQ ID NO: 89222 - DNA, 40 bp, Homo sapiens
atttaataaagatagtgctgaaagaattccttaggtaatc

SEQ ID NO: 89223 - DNA, 40 bp, Homo sapiens
gattacctaaggaattctttcagcactatctttattaaat

SEQ ID NO: 89224 - DNA, 40 bp, Homo sapiens
tttaataaagatagtgctgaaagaattccttaggtaatct

SEQ ID NO: 89225 - DNA, 40 bp, Homo sapiens
agattacctaaggaattctttcagcactatctttattaaa

SEQ ID NO: 89226 - DNA, 40 bp, Homo sapiens
ttaataaagatagtgctgaaagaattccttaggtaatcta

SEQ ID NO: 89227 - DNA, 40 bp, Homo sapiens
tagattacctaaggaattctttcagcactatctttattaa

SEQ ID NO: 89228 - DNA, 40 bp, Homo sapiens
taataaagatagtgctgaaagaattccttaggtaatctat

SEQ ID NO: 89229 - DNA, 40 bp, Homo sapiens
atagattacctaaggaattctttcagcactatctttatta

SEQ ID NO: 89230 - DNA, 40 bp, Homo sapiens
aataaagatagtgctgaaagaattccttaggtaatctata

SEQ ID NO: 89231 - DNA, 40 bp, Homo sapiens
tatagattacctaaggaattctttcagcactatctttatt

SEQ ID NO: 89232 - DNA, 40 bp, Homo sapiens
ataaagatagtgctgaaagaattccttaggtaatctataa

SEQ ID NO: 89233 - DNA, 40 bp, Homo sapiens
ttatagattacctaaggaattctttcagcactatctttat

SEQ ID NO: 89234 - DNA, 40 bp, Homo sapiens
taaagatagtgctgaaagaattccttaggtaatctataac

SEQ ID NO: 89235 - DNA, 40 bp, Homo sapiens
gttatagattacctaaggaattctttcagcactatcttta

SEQ ID NO: 89236 - DNA, 40 bp, Homo sapiens
aaagatagtgctgaaagaattccttaggtaatctataact

SEQ ID NO: 89237 - DNA, 40 bp, Homo sapiens
agttatagattacctaaggaattctttcagcactatcttt

SEQ ID NO: 89238 - DNA, 40 bp, Homo sapiens
aagatagtgctgaaagaattccttaggtaatctataacta

SEQ ID NO: 89239 - DNA, 40 bp, Homo sapiens
tagttatagattacctaaggaattctttcagcactatctt

SEQ ID NO: 89240 - DNA, 40 bp, Homo sapiens
agatagtgctgaaagaattccttaggtaatctataactag

SEQ ID NO: 89241 - DNA, 40 bp, Homo sapiens
ctagttatagattacctaaggaattctttcagcactatct

SEQ ID NO: 89242 - DNA, 40 bp, Homo sapiens
gatagtgctgaaagaattccttaggtaatctataactagg

SEQ ID NO: 89243 - DNA, 40 bp, Homo sapiens
cctagttatagattacctaaggaattctttcagcactatc

SEQ ID NO: 89244 - DNA, 40 bp, Homo sapiens
atagtgctgaaagaattccttaggtaatctataactagga

SEQ ID NO: 89245 - DNA, 40 bp, Homo sapiens
tcctagttatagattacctaaggaattctttcagcactat

SEQ ID NO: 89246 - DNA, 40 bp, Homo sapiens
tagtgctgaaagaattccttaggtaatctataactaggac

SEQ ID NO: 89247 - DNA, 40 bp, Homo sapiens
gtcctagttatagattacctaaggaattctttcagcacta

SEQ ID NO: 89248 - DNA, 40 bp, Homo sapiens
agtgctgaaagaattccttaggtaatctataactaggact

SEQ ID NO: 89249 - DNA, 40 bp, Homo sapiens
agtcctagttatagattacctaaggaattctttcagcact

SEQ ID NO: 89250 - DNA, 40 bp, Homo sapiens
gtgctgaaagaattccttaggtaatctataactaggacta

SEQ ID NO: 89251 - DNA, 40 bp, Homo sapiens
tagtcctagttatagattacctaaggaattctttcagcac

SEQ ID NO: 89252 - DNA, 40 bp, Homo sapiens
tgctgaaagaattccttaggtaatctataactaggactac

SEQ ID NO: 89253 - DNA, 40 bp, Homo sapiens
gtagtcctagttatagattacctaaggaattctttcagca

SEQ ID NO: 89254 - DNA, 40 bp, Homo sapiens
gctgaaagaattccttaggtaatctataactaggactact

SEQ ID NO: 89255 - DNA, 40 bp, Homo sapiens
agtagtcctagttatagattacctaaggaattctttcagc

SEQ ID NO: 89256 - DNA, 40 bp, Homo sapiens
ctgaaagaattccttaggtaatctataactaggactactc

SEQ ID NO: 89257 - DNA, 40 bp, Homo sapiens
gagtagtcctagttatagattacctaaggaattctttcag

SEQ ID NO: 89258 - DNA, 40 bp, Homo sapiens
tgaaagaattccttaggtaatctataactaggactactcc

SEQ ID NO: 89259 - DNA, 40 bp, Homo sapiens
ggagtagtcctagttatagattacctaaggaattctttca

SEQ ID NO: 89260 - DNA, 40 bp, Homo sapiens
gaaagaattccttaggtaatctataactaggactactcct

SEQ ID NO: 89261 - DNA, 40 bp, Homo sapiens
aggagtagtcctagttatagattacctaaggaattctttc

SEQ ID NO: 89262 - DNA, 40 bp, Homo sapiens
aaagaattccttaggtaatctataactaggactactcctg

SEQ ID NO: 89263 - DNA, 40 bp, Homo sapiens
caggagtagtcctagttatagattacctaaggaattcttt

SEQ ID NO: 89264 - DNA, 40 bp, Homo sapiens
aagaattccttaggtaatctataactaggactactcctgg

SEQ ID NO: 89265 - DNA, 40 bp, Homo sapiens
ccaggagtagtcctagttatagattacctaaggaattctt

SEQ ID NO: 89266 - DNA, 40 bp, Homo sapiens
agaattccttaggtaatctataactaggactactcctggt

SEQ ID NO: 89267 - DNA, 40 bp, Homo sapiens
accaggagtagtcctagttatagattacctaaggaattct

SEQ ID NO: 89268 - DNA, 40 bp, Homo sapiens
gaattccttaggtaatctataactaggactactcctggta

SEQ ID NO: 89269 - DNA, 40 bp, Homo sapiens
taccaggagtagtcctagttatagattacctaaggaattc

SEQ ID NO: 89270 - DNA, 40 bp, Homo sapiens
aattccttaggtaatctataactaggactactcctggtaa

SEQ ID NO: 89271 - DNA, 40 bp, Homo sapiens
ttaccaggagtagtcctagttatagattacctaaggaatt

SEQ ID NO: 89272 - DNA, 40 bp, Homo sapiens
attccttaggtaatctataactaggactactcctggtaac

SEQ ID NO: 89273 - DNA, 40 bp, Homo sapiens
gttaccaggagtagtcctagttatagattacctaaggaat

SEQ ID NO: 89274 - DNA, 40 bp, Homo sapiens
ttccttaggtaatctataactaggactactcctggtaaca

SEQ ID NO: 89275 - DNA, 40 bp, Homo sapiens
tgttaccaggagtagtcctagttatagattacctaaggaa

SEQ ID NO: 89276 - DNA, 40 bp, Homo sapiens
tccttaggtaatctataactaggactactcctggtaacag

SEQ ID NO: 89277 - DNA, 40 bp, Homo sapiens
ctgttaccaggagtagtcctagttatagattacctaagga

SEQ ID NO: 89278 - DNA, 40 bp, Homo sapiens
ccttaggtaatctataactaggactactcctggtaacagt

SEQ ID NO: 89279 - DNA, 40 bp, Homo sapiens
actgttaccaggagtagtcctagttatagattacctaagg

SEQ ID NO: 89280 - DNA, 40 bp, Homo sapiens
cttaggtaatctataactaggactactcctggtaacagta

SEQ ID NO: 89281 - DNA, 40 bp, Homo sapiens
tactgttaccaggagtagtcctagttatagattacctaag

SEQ ID NO: 89282 - DNA, 40 bp, Homo sapiens
ttaggtaatctataactaggactactcctggtaacagtaa

SEQ ID NO: 89283 - DNA, 40 bp, Homo sapiens
ttactgttaccaggagtagtcctagttatagattacctaa

SEQ ID NO: 89284 - DNA, 40 bp, Homo sapiens
taggtaatctataactaggactactcctggtaacagtaat

SEQ ID NO: 89285 - DNA, 40 bp, Homo sapiens
attactgttaccaggagtagtcctagttatagattaccta

SEQ ID NO: 89286 - DNA, 40 bp, Homo sapiens
aggtaatctataactaggactactcctggtaacagtaata

SEQ ID NO: 89287 - DNA, 40 bp, Homo sapiens
tattactgttaccaggagtagtcctagttatagattacct

SEQ ID NO: 89288 - DNA, 40 bp, Homo sapiens
ggtaatctataactaggactactcctggtaacagtaatac

SEQ ID NO: 89289 - DNA, 40 bp, Homo sapiens
gtattactgttaccaggagtagtcctagttatagattacc

SEQ ID NO: 89290 - DNA, 40 bp, Homo sapiens
gtaatctataactaggactactcctggtaacagtaataca

SEQ ID NO: 89291 - DNA, 40 bp, Homo sapiens
tgtattactgttaccaggagtagtcctagttatagattac

SEQ ID NO: 89292 - DNA, 40 bp, Homo sapiens
taatctataactaggactactcctggtaacagtaatacat

SEQ ID NO: 89293 - DNA, 40 bp, Homo sapiens
atgtattactgttaccaggagtagtcctagttatagatta

SEQ ID NO: 89294 - DNA, 40 bp, Homo sapiens
aatctataactaggactactcctggtaacagtaatacatt

SEQ ID NO: 89295 - DNA, 40 bp, Homo sapiens
aatgtattactgttaccaggagtagtcctagttatagatt

SEQ ID NO: 89296 - DNA, 40 bp, Homo sapiens
atctataactaggactactcctggtaacagtaatacattc

SEQ ID NO: 89297 - DNA, 40 bp, Homo sapiens
gaatgtattactgttaccaggagtagtcctagttatagat

SEQ ID NO: 89298 - DNA, 40 bp, Homo sapiens
tctataactaggactactcctggtaacagtaatacattcc

SEQ ID NO: 89299 - DNA, 40 bp, Homo sapiens
ggaatgtattactgttaccaggagtagtcctagttataga

SEQ ID NO: 89300 - DNA, 40 bp, Homo sapiens
ctataactaggactactcctggtaacagtaatacattcca

SEQ ID NO: 89301 - DNA, 40 bp, Homo sapiens
tggaatgtattactgttaccaggagtagtcctagttatag

SEQ ID NO: 89302 - DNA, 40 bp, Homo sapiens
tataactaggactactcctggtaacagtaatacattccat

SEQ ID NO: 89303 - DNA, 40 bp, Homo sapiens
atggaatgtattactgttaccaggagtagtcctagttata

SEQ ID NO: 89304 - DNA, 40 bp, Homo sapiens
ataactaggactactcctggtaacagtaatacattccatt

SEQ ID NO: 89305 - DNA, 40 bp, Homo sapiens
aatggaatgtattactgttaccaggagtagtcctagttat

SEQ ID NO: 89306 - DNA, 40 bp, Homo sapiens
taactaggactactcctggtaacagtaatacattccattg

SEQ ID NO: 89307 - DNA, 40 bp, Homo sapiens
caatggaatgtattactgttaccaggagtagtcctagtta

SEQ ID NO: 89308 - DNA, 40 bp, Homo sapiens
aactaggactactcctggtaacagtaatacattccattgt

SEQ ID NO: 89309 - DNA, 40 bp, Homo sapiens
acaatggaatgtattactgttaccaggagtagtcctagtt

SEQ ID NO: 89310 - DNA, 40 bp, Homo sapiens
actaggactactcctggtaacagtaatacattccattgtt

SEQ ID NO: 89311 - DNA, 40 bp, Homo sapiens
aacaatggaatgtattactgttaccaggagtagtcctagt

SEQ ID NO: 89312 - DNA, 40 bp, Homo sapiens
ctaggactactcctggtaacagtaatacattccattgttt

SEQ ID NO: 89313 - DNA, 40 bp, Homo sapiens
aaacaatggaatgtattactgttaccaggagtagtcctag

SEQ ID NO: 89314 - DNA, 40 bp, Homo sapiens
taggactactcctggtaacagtaatacattccattgtttt

SEQ ID NO: 89315 - DNA, 40 bp, Homo sapiens
aaaacaatggaatgtattactgttaccaggagtagtccta

SEQ ID NO: 89316 - DNA, 40 bp, Homo sapiens
aggactactcctggtaacagtaatacattccattgtttta

SEQ ID NO: 89317 - DNA, 40 bp, Homo sapiens
taaaacaatggaatgtattactgttaccaggagtagtcct

SEQ ID NO: 89318 - DNA, 40 bp, Homo sapiens
ggactactcctggtaacagtaatacattccattgttttag

SEQ ID NO: 89319 - DNA, 40 bp, Homo sapiens
ctaaaacaatggaatgtattactgttaccaggagtagtcc

SEQ ID NO: 89320 - DNA, 40 bp, Homo sapiens
gactactcctggtaacagtaatacattccattgttttagt

SEQ ID NO: 89321 - DNA, 40 bp, Homo sapiens
actaaaacaatggaatgtattactgttaccaggagtagtc

SEQ ID NO: 89322 - DNA, 40 bp, Homo sapiens
actactcctggtaacagtaatacattccattgttttagta

SEQ ID NO: 89323 - DNA, 40 bp, Homo sapiens
tactaaaacaatggaatgtattactgttaccaggagtagt

SEQ ID NO: 89324 - DNA, 40 bp, Homo sapiens
ctactcctggtaacagtaatacattccattgttttagtaa

SEQ ID NO: 89325 - DNA, 40 bp, Homo sapiens
ttactaaaacaatggaatgtattactgttaccaggagtag

SEQ ID NO: 89326 - DNA, 40 bp, Homo sapiens
tactcctggtaacagtaatacattccattgttttagtaac

SEQ ID NO: 89327 - DNA, 40 bp, Homo sapiens
gttactaaaacaatggaatgtattactgttaccaggagta

SEQ ID NO: 89328 - DNA, 40 bp, Homo sapiens
actcctggtaacagtaatacattccattgttttagtaacc

SEQ ID NO: 89329 - DNA, 40 bp, Homo sapiens
ggttactaaaacaatggaatgtattactgttaccaggagt

SEQ ID NO: 89330 - DNA, 40 bp, Homo sapiens
ctcctggtaacagtaatacattccattgttttagtaacca

SEQ ID NO: 89331 - DNA, 40 bp, Homo sapiens
tggttactaaaacaatggaatgtattactgttaccaggag

SEQ ID NO: 89332 - DNA, 40 bp, Homo sapiens
tcctggtaacagtaatacattccattgttttagtaaccag

SEQ ID NO: 89333 - DNA, 40 bp, Homo sapiens
ctggttactaaaacaatggaatgtattactgttaccagga

SEQ ID NO: 89334 - DNA, 40 bp, Homo sapiens
cctggtaacagtaatacattccattgttttagtaaccaga

SEQ ID NO: 89335 - DNA, 40 bp, Homo sapiens
tctggttactaaaacaatggaatgtattactgttaccagg

SEQ ID NO: 89336 - DNA, 40 bp, Homo sapiens
ctggtaacagtaatacattccattgttttagtaaccagaa

SEQ ID NO: 89337 - DNA, 40 bp, Homo sapiens
ttctggttactaaaacaatggaatgtattactgttaccag

SEQ ID NO: 89338 - DNA, 40 bp, Homo sapiens
tggtaacagtaatacattccattgttttagtaaccagaaa

SEQ ID NO: 89339 - DNA, 40 bp, Homo sapiens
tttctggttactaaaacaatggaatgtattactgttacca

SEQ ID NO: 89340 - DNA, 40 bp, Homo sapiens
ggtaacagtaatacattccattgttttagtaaccagaaat

SEQ ID NO: 89341 - DNA, 40 bp, Homo sapiens
atttctggttactaaaacaatggaatgtattactgttacc

SEQ ID NO: 89342 - DNA, 40 bp, Homo sapiens
gtaacagtaatacattccattgttttagtaaccagaaatc

SEQ ID NO: 89343 - DNA, 40 bp, Homo sapiens
gatttctggttactaaaacaatggaatgtattactgttac

SEQ ID NO: 89344 - DNA, 40 bp, Homo sapiens
taacagtaatacattccattgttttagtaaccagaaatct

SEQ ID NO: 89345 - DNA, 40 bp, Homo sapiens
agatttctggttactaaaacaatggaatgtattactgtta

SEQ ID NO: 89346 - DNA, 40 bp, Homo sapiens
aacagtaatacattccattgttttagtaaccagaaatctt

SEQ ID NO: 89347 - DNA, 40 bp, Homo sapiens
aagatttctggttactaaaacaatggaatgtattactgtt

SEQ ID NO: 89348 - DNA, 40 bp, Homo sapiens
acagtaatacattccattgttttagtaaccagaaatcttc

SEQ ID NO: 89349 - DNA, 40 bp, Homo sapiens
gaagatttctggttactaaaacaatggaatgtattactgt

SEQ ID NO: 89350 - DNA, 40 bp, Homo sapiens
cagtaatacattccattgttttagtaaccagaaatcttca

SEQ ID NO: 89351 - DNA, 40 bp, Homo sapiens
tgaagatttctggttactaaaacaatggaatgtattactg

SEQ ID NO: 89352 - DNA, 40 bp, Homo sapiens
agtaatacattccattgttttagtaaccagaaatcttcat

SEQ ID NO: 89353 - DNA, 40 bp, Homo sapiens
atgaagatttctggttactaaaacaatggaatgtattact

SEQ ID NO: 89354 - DNA, 40 bp, Homo sapiens
gtaatacattccattgttttagtaaccagaaatcttcatg

SEQ ID NO: 89355 - DNA, 40 bp, Homo sapiens
catgaagatttctggttactaaaacaatggaatgtattac

SEQ ID NO: 89356 - DNA, 40 bp, Homo sapiens
taatacattccattgttttagtaaccagaaatcttcatgc

SEQ ID NO: 89357 - DNA, 40 bp, Homo sapiens
gcatgaagatttctggttactaaaacaatggaatgtatta

SEQ ID NO: 89358 - DNA, 40 bp, Homo sapiens
aatacattccattgttttagtaaccagaaatcttcatgca

SEQ ID NO: 89359 - DNA, 40 bp, Homo sapiens
tgcatgaagatttctggttactaaaacaatggaatgtatt

SEQ ID NO: 89360 - DNA, 40 bp, Homo sapiens
atacattccattgttttagtaaccagaaatcttcatgcaa

SEQ ID NO: 89361 - DNA, 40 bp, Homo sapiens
ttgcatgaagatttctggttactaaaacaatggaatgtat

SEQ ID NO: 89362 - DNA, 40 bp, Homo sapiens
tacattccattgttttagtaaccagaaatcttcatgcaat

SEQ ID NO: 89363 - DNA, 40 bp, Homo sapiens
attgcatgaagatttctggttactaaaacaatggaatgta

SEQ ID NO: 89364 - DNA, 40 bp, Homo sapiens
acattccattgttttagtaaccagaaatcttcatgcaatg

SEQ ID NO: 89365 - DNA, 40 bp, Homo sapiens
cattgcatgaagatttctggttactaaaacaatggaatgt

SEQ ID NO: 89366 - DNA, 40 bp, Homo sapiens
cattccattgttttagtaaccagaaatcttcatgcaatga

SEQ ID NO: 89367 - DNA, 40 bp, Homo sapiens
tcattgcatgaagatttctggttactaaaacaatggaatg

SEQ ID NO: 89368 - DNA, 40 bp, Homo sapiens
attccattgttttagtaaccagaaatcttcatgcaatgaa

SEQ ID NO: 89369 - DNA, 40 bp, Homo sapiens
ttcattgcatgaagatttctggttactaaaacaatggaat

SEQ ID NO: 89370 - DNA, 40 bp, Homo sapiens
ttccattgttttagtaaccagaaatcttcatgcaatgaaa

SEQ ID NO: 89371 - DNA, 40 bp, Homo sapiens
tttcattgcatgaagatttctggttactaaaacaatggaa

SEQ ID NO: 89372 - DNA, 40 bp, Homo sapiens
tccattgttttagtaaccagaaatcttcatgcaatgaaaa

SEQ ID NO: 89373 - DNA, 40 bp, Homo sapiens
ttttcattgcatgaagatttctggttactaaaacaatgga

SEQ ID NO: 89374 - DNA, 40 bp, Homo sapiens
ccattgttttagtaaccagaaatcttcatgcaatgaaaaa

SEQ ID NO: 89375 - DNA, 40 bp, Homo sapiens
tttttcattgcatgaagatttctggttactaaaacaatgg

SEQ ID NO: 89376 - DNA, 40 bp, Homo sapiens
cattgttttagtaaccagaaatcttcatgcaatgaaaaat

SEQ ID NO: 89377 - DNA, 40 bp, Homo sapiens
atttttcattgcatgaagatttctggttactaaaacaatg

SEQ ID NO: 89378 - DNA, 40 bp, Homo sapiens
attgttttagtaaccagaaatcttcatgcaatgaaaaata

SEQ ID NO: 89379 - DNA, 40 bp, Homo sapiens
tatttttcattgcatgaagatttctggttactaaaacaat

SEQ ID NO: 89380 - DNA, 40 bp, Homo sapiens
ttgttttagtaaccagaaatcttcatgcaatgaaaaatac

SEQ ID NO: 89381 - DNA, 40 bp, Homo sapiens
gtatttttcattgcatgaagatttctggttactaaaacaa

SEQ ID NO: 89382 - DNA, 40 bp, Homo sapiens
tgttttagtaaccagaaatcttcatgcaatgaaaaatact

SEQ ID NO: 89383 - DNA, 40 bp, Homo sapiens
agtatttttcattgcatgaagatttctggttactaaaaca

SEQ ID NO: 89384 - DNA, 40 bp, Homo sapiens
gttttagtaaccagaaatcttcatgcaatgaaaaatactt

SEQ ID NO: 89385 - DNA, 40 bp, Homo sapiens
aagtatttttcattgcatgaagatttctggttactaaaac

SEQ ID NO: 89386 - DNA, 40 bp, Homo sapiens
ttttagtaaccagaaatcttcatgcaatgaaaaatacttt

SEQ ID NO: 89387 - DNA, 40 bp, Homo sapiens
aaagtatttttcattgcatgaagatttctggttactaaaa

SEQ ID NO: 89388 - DNA, 40 bp, Homo sapiens
tttagtaaccagaaatcttcatgcaatgaaaaatacttta

SEQ ID NO: 89389 - DNA, 40 bp, Homo sapiens
taaagtatttttcattgcatgaagatttctggttactaaa

SEQ ID NO: 89390 - DNA, 40 bp, Homo sapiens
ttagtaaccagaaatcttcatgcaatgaaaaatactttaa

SEQ ID NO: 89391 - DNA, 40 bp, Homo sapiens
ttaaagtatttttcattgcatgaagatttctggttactaa

SEQ ID NO: 89392 - DNA, 40 bp, Homo sapiens
tagtaaccagaaatcttcatgcaatgaaaaatactttaat

SEQ ID NO: 89393 - DNA, 40 bp, Homo sapiens
attaaagtatttttcattgcatgaagatttctggttacta

SEQ ID NO: 89394 - DNA, 40 bp, Homo sapiens
agtaaccagaaatcttcatgcaatgaaaaatactttaatt

SEQ ID NO: 89395 - DNA, 40 bp, Homo sapiens
aattaaagtatttttcattgcatgaagatttctggttact

SEQ ID NO: 89396 - DNA, 40 bp, Homo sapiens
gtaaccagaaatcttcatgcaatgaaaaatactttaattc

SEQ ID NO: 89397 - DNA, 40 bp, Homo sapiens
gaattaaagtatttttcattgcatgaagatttctggttac

SEQ ID NO: 89398 - DNA, 40 bp, Homo sapiens
taaccagaaatcttcatgcaatgaaaaatactttaattca

SEQ ID NO: 89399 - DNA, 40 bp, Homo sapiens
tgaattaaagtatttttcattgcatgaagatttctggtta

SEQ ID NO: 89400 - DNA, 40 bp, Homo sapiens
aaccagaaatcttcatgcaatgaaaaatactttaattcat

SEQ ID NO: 89401 - DNA, 40 bp, Homo sapiens
atgaattaaagtatttttcattgcatgaagatttctggtt

SEQ ID NO: 89402 - DNA, 40 bp, Homo sapiens
accagaaatcttcatgcaatgaaaaatactttaattcatg

SEQ ID NO: 89403 - DNA, 40 bp, Homo sapiens
catgaattaaagtatttttcattgcatgaagatttctggt

SEQ ID NO: 89404 - DNA, 40 bp, Homo sapiens
ccagaaatcttcatgcaatgaaaaatactttaattcatga

SEQ ID NO: 89405 - DNA, 40 bp, Homo sapiens
tcatgaattaaagtatttttcattgcatgaagatttctgg

SEQ ID NO: 89406 - DNA, 40 bp, Homo sapiens
cagaaatcttcatgcaatgaaaaatactttaattcatgaa

SEQ ID NO: 89407 - DNA, 40 bp, Homo sapiens
ttcatgaattaaagtatttttcattgcatgaagatttctg

SEQ ID NO: 89408 - DNA, 40 bp, Homo sapiens
agaaatcttcatgcaatgaaaaatactttaattcatgaag

SEQ ID NO: 89409 - DNA, 40 bp, Homo sapiens
cttcatgaattaaagtatttttcattgcatgaagatttct

SEQ ID NO: 89410 - DNA, 40 bp, Homo sapiens
gaaatcttcatgcaatgaaaaatactttaattcatgaagc

SEQ ID NO: 89411 - DNA, 40 bp, Homo sapiens
gcttcatgaattaaagtatttttcattgcatgaagatttc

SEQ ID NO: 89412 - DNA, 40 bp, Homo sapiens
aaatcttcatgcaatgaaaaatactttaattcatgaagct

SEQ ID NO: 89413 - DNA, 40 bp, Homo sapiens
agcttcatgaattaaagtatttttcattgcatgaagattt

SEQ ID NO: 89414 - DNA, 40 bp, Homo sapiens
aatcttcatgcaatgaaaaatactttaattcatgaagctt

SEQ ID NO: 89415 - DNA, 40 bp, Homo sapiens
aagcttcatgaattaaagtatttttcattgcatgaagatt

SEQ ID NO: 89416 - DNA, 40 bp, Homo sapiens
atcttcatgcaatgaaaaatactttaattcatgaagctta

SEQ ID NO: 89417 - DNA, 40 bp, Homo sapiens
taagcttcatgaattaaagtatttttcattgcatgaagat

SEQ ID NO: 89418 - DNA, 40 bp, Homo sapiens
tcttcatgcaatgaaaaatactttaattcatgaagcttac

SEQ ID NO: 89419 - DNA, 40 bp, Homo sapiens
gtaagcttcatgaattaaagtatttttcattgcatgaaga

SEQ ID NO: 89420 - DNA, 40 bp, Homo sapiens
cttcatgcaatgaaaaatactttaattcatgaagcttact

SEQ ID NO: 89421 - DNA, 40 bp, Homo sapiens
agtaagcttcatgaattaaagtatttttcattgcatgaag

SEQ ID NO: 89422 - DNA, 40 bp, Homo sapiens
ttcatgcaatgaaaaatactttaattcatgaagcttactt

SEQ ID NO: 89423 - DNA, 40 bp, Homo sapiens
aagtaagcttcatgaattaaagtatttttcattgcatgaa

SEQ ID NO: 89424 - DNA, 40 bp, Homo sapiens
tcatgcaatgaaaaatactttaattcatgaagcttacttt

SEQ ID NO: 89425 - DNA, 40 bp, Homo sapiens
aaagtaagcttcatgaattaaagtatttttcattgcatga

SEQ ID NO: 89426 - DNA, 40 bp, Homo sapiens
catgcaatgaaaaatactttaattcatgaagcttactttt

SEQ ID NO: 89427 - DNA, 40 bp, Homo sapiens
aaaagtaagcttcatgaattaaagtatttttcattgcatg

SEQ ID NO: 89428 - DNA, 40 bp, Homo sapiens
atgcaatgaaaaatactttaattcatgaagcttacttttt

SEQ ID NO: 89429 - DNA, 40 bp, Homo sapiens
aaaaagtaagcttcatgaattaaagtatttttcattgcat

SEQ ID NO: 89430 - DNA, 40 bp, Homo sapiens
tgcaatgaaaaatactttaattcatgaagcttactttttt

SEQ ID NO: 89431 - DNA, 40 bp, Homo sapiens
aaaaaagtaagcttcatgaattaaagtatttttcattgca

SEQ ID NO: 89432 - DNA, 40 bp, Homo sapiens
gcaatgaaaaatactttaattcatgaagcttacttttttt

SEQ ID NO: 89433 - DNA, 40 bp, Homo sapiens
aaaaaaagtaagcttcatgaattaaagtatttttcattgc

SEQ ID NO: 89434 - DNA, 40 bp, Homo sapiens
caatgaaaaatactttaattcatgaagcttactttttttt

SEQ ID NO: 89435 - DNA, 40 bp, Homo sapiens
aaaaaaaagtaagcttcatgaattaaagtatttttcattg

SEQ ID NO: 89436 - DNA, 40 bp, Homo sapiens
aatgaaaaatactttaattcatgaagcttacttttttttt

SEQ ID NO: 89437 - DNA, 40 bp, Homo sapiens
aaaaaaaaagtaagcttcatgaattaaagtatttttcatt

SEQ ID NO: 89438 - DNA, 40 bp, Homo sapiens
atgaaaaatactttaattcatgaagcttactttttttttt

SEQ ID NO: 89439 - DNA, 40 bp, Homo sapiens
aaaaaaaaaagtaagcttcatgaattaaagtatttttcat

SEQ ID NO: 89440 - DNA, 40 bp, Homo sapiens
tgaaaaatactttaattcatgaagcttacttttttttttt

SEQ ID NO: 89441 - DNA, 40 bp, Homo sapiens
aaaaaaaaaaagtaagcttcatgaattaaagtatttttca

SEQ ID NO: 89442 - DNA, 40 bp, Homo sapiens
gaaaaatactttaattcatgaagcttactttttttttttg

SEQ ID NO: 89443 - DNA, 40 bp, Homo sapiens
caaaaaaaaaaagtaagcttcatgaattaaagtatttttc

SEQ ID NO: 89444 - DNA, 40 bp, Homo sapiens
aaaaatactttaattcatgaagcttactttttttttttgg

SEQ ID NO: 89445 - DNA, 40 bp, Homo sapiens
ccaaaaaaaaaaagtaagcttcatgaattaaagtattttt

SEQ ID NO: 89446 - DNA, 40 bp, Homo sapiens
aaaatactttaattcatgaagcttactttttttttttggt

SEQ ID NO: 89447 - DNA, 40 bp, Homo sapiens
accaaaaaaaaaaagtaagcttcatgaattaaagtatttt

SEQ ID NO: 89448 - DNA, 40 bp, Homo sapiens
aaatactttaattcatgaagcttactttttttttttggtg

SEQ ID NO: 89449 - DNA, 40 bp, Homo sapiens
caccaaaaaaaaaaagtaagcttcatgaattaaagtattt

SEQ ID NO: 89450 - DNA, 40 bp, Homo sapiens
aatactttaattcatgaagcttactttttttttttggtgt

SEQ ID NO: 89451 - DNA, 40 bp, Homo sapiens
acaccaaaaaaaaaaagtaagcttcatgaattaaagtatt

SEQ ID NO: 89452 - DNA, 40 bp, Homo sapiens
atactttaattcatgaagcttactttttttttttggtgtc

SEQ ID NO: 89453 - DNA, 40 bp, Homo sapiens
gacaccaaaaaaaaaaagtaagcttcatgaattaaagtat

SEQ ID NO: 89454 - DNA, 40 bp, Homo sapiens
tactttaattcatgaagcttactttttttttttggtgtca

SEQ ID NO: 89455 - DNA, 40 bp, Homo sapiens
tgacaccaaaaaaaaaaagtaagcttcatgaattaaagta

SEQ ID NO: 89456 - DNA, 40 bp, Homo sapiens
actttaattcatgaagcttactttttttttttggtgtcag

SEQ ID NO: 89457 - DNA, 40 bp, Homo sapiens
ctgacaccaaaaaaaaaaagtaagcttcatgaattaaagt

SEQ ID NO: 89458 - DNA, 40 bp, Homo sapiens
ctttaattcatgaagcttactttttttttttggtgtcaga

SEQ ID NO: 89459 - DNA, 40 bp, Homo sapiens
tctgacaccaaaaaaaaaaagtaagcttcatgaattaaag

SEQ ID NO: 89460 - DNA, 40 bp, Homo sapiens
tttaattcatgaagcttactttttttttttggtgtcagag

SEQ ID NO: 89461 - DNA, 40 bp, Homo sapiens
ctctgacaccaaaaaaaaaaagtaagcttcatgaattaaa

SEQ ID NO: 89462 - DNA, 40 bp, Homo sapiens
ttaattcatgaagcttactttttttttttggtgtcagagt

SEQ ID NO: 89463 - DNA, 40 bp, Homo sapiens
actctgacaccaaaaaaaaaaagtaagcttcatgaattaa

SEQ ID NO: 89464 - DNA, 40 bp, Homo sapiens
taattcatgaagcttactttttttttttggtgtcagagtc

SEQ ID NO: 89465 - DNA, 40 bp, Homo sapiens
gactctgacaccaaaaaaaaaaagtaagcttcatgaatta

SEQ ID NO: 89466 - DNA, 40 bp, Homo sapiens
aattcatgaagcttactttttttttttggtgtcagagtct

SEQ ID NO: 89467 - DNA, 40 bp, Homo sapiens
agactctgacaccaaaaaaaaaaagtaagcttcatgaatt

SEQ ID NO: 89468 - DNA, 40 bp, Homo sapiens
attcatgaagcttactttttttttttggtgtcagagtctc

SEQ ID NO: 89469 - DNA, 40 bp, Homo sapiens
gagactctgacaccaaaaaaaaaaagtaagcttcatgaat

SEQ ID NO: 89470 - DNA, 40 bp, Homo sapiens
ttcatgaagcttactttttttttttggtgtcagagtctcg

SEQ ID NO: 89471 - DNA, 40 bp, Homo sapiens
cgagactctgacaccaaaaaaaaaaagtaagcttcatgaa

SEQ ID NO: 89472 - DNA, 40 bp, Homo sapiens
tcatgaagcttactttttttttttggtgtcagagtctcgc

SEQ ID NO: 89473 - DNA, 40 bp, Homo sapiens
gcgagactctgacaccaaaaaaaaaaagtaagcttcatga

SEQ ID NO: 89474 - DNA, 40 bp, Homo sapiens
catgaagcttactttttttttttggtgtcagagtctcgct

SEQ ID NO: 89475 - DNA, 40 bp, Homo sapiens
agcgagactctgacaccaaaaaaaaaaagtaagcttcatg

SEQ ID NO: 89476 - DNA, 40 bp, Homo sapiens
atgaagcttactttttttttttggtgtcagagtctcgctc

SEQ ID NO: 89477 - DNA, 40 bp, Homo sapiens
gagcgagactctgacaccaaaaaaaaaaagtaagcttcat

SEQ ID NO: 89478 - DNA, 40 bp, Homo sapiens
tgaagcttactttttttttttggtgtcagagtctcgctct

SEQ ID NO: 89479 - DNA, 40 bp, Homo sapiens
agagcgagactctgacaccaaaaaaaaaaagtaagcttca

SEQ ID NO: 89480 - DNA, 40 bp, Homo sapiens
gaagcttactttttttttttggtgtcagagtctcgctctt

SEQ ID NO: 89481 - DNA, 40 bp, Homo sapiens
aagagcgagactctgacaccaaaaaaaaaaagtaagcttc

SEQ ID NO: 89482 - DNA, 40 bp, Homo sapiens
aagcttactttttttttttggtgtcagagtctcgctcttg

SEQ ID NO: 89483 - DNA, 40 bp, Homo sapiens
caagagcgagactctgacaccaaaaaaaaaaagtaagctt

SEQ ID NO: 89484 - DNA, 40 bp, Homo sapiens
agcttactttttttttttggtgtcagagtctcgctcttgt

SEQ ID NO: 89485 - DNA, 40 bp, Homo sapiens
acaagagcgagactctgacaccaaaaaaaaaaagtaagct

SEQ ID NO: 89486 - DNA, 40 bp, Homo sapiens
gcttactttttttttttggtgtcagagtctcgctcttgtc

SEQ ID NO: 89487 - DNA, 40 bp, Homo sapiens
gacaagagcgagactctgacaccaaaaaaaaaaagtaagc

SEQ ID NO: 89488 - DNA, 40 bp, Homo sapiens
cttactttttttttttggtgtcagagtctcgctcttgtca

SEQ ID NO: 89489 - DNA, 40 bp, Homo sapiens
tgacaagagcgagactctgacaccaaaaaaaaaaagtaag

SEQ ID NO: 89490 - DNA, 40 bp, Homo sapiens
ttactttttttttttggtgtcagagtctcgctcttgtcac

SEQ ID NO: 89491 - DNA, 40 bp, Homo sapiens
gtgacaagagcgagactctgacaccaaaaaaaaaaagtaa

SEQ ID NO: 89492 - DNA, 40 bp, Homo sapiens
tactttttttttttggtgtcagagtctcgctcttgtcacc

SEQ ID NO: 89493 - DNA, 40 bp, Homo sapiens
ggtgacaagagcgagactctgacaccaaaaaaaaaaagta

SEQ ID NO: 89494 - DNA, 40 bp, Homo sapiens
actttttttttttggtgtcagagtctcgctcttgtcaccc

SEQ ID NO: 89495 - DNA, 40 bp, Homo sapiens
gggtgacaagagcgagactctgacaccaaaaaaaaaaagt

SEQ ID NO: 89496 - DNA, 40 bp, Homo sapiens
ctttttttttttggtgtcagagtctcgctcttgtcaccca

SEQ ID NO: 89497 - DNA, 40 bp, Homo sapiens
tgggtgacaagagcgagactctgacaccaaaaaaaaaaag

SEQ ID NO: 89498 - DNA, 40 bp, Homo sapiens
tttttttttttggtgtcagagtctcgctcttgtcacccag

SEQ ID NO: 89499 - DNA, 40 bp, Homo sapiens
ctgggtgacaagagcgagactctgacaccaaaaaaaaaaa

SEQ ID NO: 89500 - DNA, 40 bp, Homo sapiens
ttttttttttggtgtcagagtctcgctcttgtcacccagg

SEQ ID NO: 89501 - DNA, 40 bp, Homo sapiens
cctgggtgacaagagcgagactctgacaccaaaaaaaaaa

SEQ ID NO: 89502 - DNA, 40 bp, Homo sapiens
tttttttttggtgtcagagtctcgctcttgtcacccaggc

SEQ ID NO: 89503 - DNA, 40 bp, Homo sapiens
gcctgggtgacaagagcgagactctgacaccaaaaaaaaa

SEQ ID NO: 89504 - DNA, 40 bp, Homo sapiens
ttttttttggtgtcagagtctcgctcttgtcacccaggct

SEQ ID NO: 89505 - DNA, 40 bp, Homo sapiens
agcctgggtgacaagagcgagactctgacaccaaaaaaaa

SEQ ID NO: 89506 - DNA, 40 bp, Homo sapiens
tttttttggtgtcagagtctcgctcttgtcacccaggctg

SEQ ID NO: 89507 - DNA, 40 bp, Homo sapiens
cagcctgggtgacaagagcgagactctgacaccaaaaaaa

SEQ ID NO: 89508 - DNA, 40 bp, Homo sapiens
ttttttggtgtcagagtctcgctcttgtcacccaggctgg

SEQ ID NO: 89509 - DNA, 40 bp, Homo sapiens
ccagcctgggtgacaagagcgagactctgacaccaaaaaa

SEQ ID NO: 89510 - DNA, 40 bp, Homo sapiens
tttttggtgtcagagtctcgctcttgtcacccaggctgga

SEQ ID NO: 89511 - DNA, 40 bp, Homo sapiens
tccagcctgggtgacaagagcgagactctgacaccaaaaa

SEQ ID NO: 89512 - DNA, 40 bp, Homo sapiens
ttttggtgtcagagtctcgctcttgtcacccaggctggaa

SEQ ID NO: 89513 - DNA, 40 bp, Homo sapiens
ttccagcctgggtgacaagagcgagactctgacaccaaaa

SEQ ID NO: 89514 - DNA, 40 bp, Homo sapiens
tttggtgtcagagtctcgctcttgtcacccaggctggaat

SEQ ID NO: 89515 - DNA, 40 bp, Homo sapiens
attccagcctgggtgacaagagcgagactctgacaccaaa

SEQ ID NO: 89516 - DNA, 40 bp, Homo sapiens
ttggtgtcagagtctcgctcttgtcacccaggctggaatg

SEQ ID NO: 89517 - DNA, 40 bp, Homo sapiens
cattccagcctgggtgacaagagcgagactctgacaccaa

SEQ ID NO: 89518 - DNA, 40 bp, Homo sapiens
tggtgtcagagtctcgctcttgtcacccaggctggaatgc

SEQ ID NO: 89519 - DNA, 40 bp, Homo sapiens
gcattccagcctgggtgacaagagcgagactctgacacca

SEQ ID NO: 89520 - DNA, 40 bp, Homo sapiens
ggtgtcagagtctcgctcttgtcacccaggctggaatgca

SEQ ID NO: 89521 - DNA, 40 bp, Homo sapiens
tgcattccagcctgggtgacaagagcgagactctgacacc

SEQ ID NO: 89522 - DNA, 40 bp, Homo sapiens
gtgtcagagtctcgctcttgtcacccaggctggaatgcag

SEQ ID NO: 89523 - DNA, 40 bp, Homo sapiens
ctgcattccagcctgggtgacaagagcgagactctgacac

SEQ ID NO: 89524 - DNA, 40 bp, Homo sapiens
tgtcagagtctcgctcttgtcacccaggctggaatgcagt

SEQ ID NO: 89525 - DNA, 40 bp, Homo sapiens
actgcattccagcctgggtgacaagagcgagactctgaca

SEQ ID NO: 89526 - DNA, 40 bp, Homo sapiens
gtcagagtctcgctcttgtcacccaggctggaatgcagtg

SEQ ID NO: 89527 - DNA, 40 bp, Homo sapiens
cactgcattccagcctgggtgacaagagcgagactctgac

SEQ ID NO: 89528 - DNA, 40 bp, Homo sapiens
tcagagtctcgctcttgtcacccaggctggaatgcagtgg

SEQ ID NO: 89529 - DNA, 40 bp, Homo sapiens
ccactgcattccagcctgggtgacaagagcgagactctga

SEQ ID NO: 89530 - DNA, 40 bp, Homo sapiens
cagagtctcgctcttgtcacccaggctggaatgcagtggc

SEQ ID NO: 89531 - DNA, 40 bp, Homo sapiens
gccactgcattccagcctgggtgacaagagcgagactctg

SEQ ID NO: 89532 - DNA, 40 bp, Homo sapiens
agagtctcgctcttgtcacccaggctggaatgcagtggcg

SEQ ID NO: 89533 - DNA, 40 bp, Homo sapiens
cgccactgcattccagcctgggtgacaagagcgagactct

SEQ ID NO: 89534 - DNA, 40 bp, Homo sapiens
gagtctcgctcttgtcacccaggctggaatgcagtggcgc

SEQ ID NO: 89535 - DNA, 40 bp, Homo sapiens
gcgccactgcattccagcctgggtgacaagagcgagactc

SEQ ID NO: 89536 - DNA, 40 bp, Homo sapiens
agtctcgctcttgtcacccaggctggaatgcagtggcgcc

SEQ ID NO: 89537 - DNA, 40 bp, Homo sapiens
ggcgccactgcattccagcctgggtgacaagagcgagact

SEQ ID NO: 89538 - DNA, 40 bp, Homo sapiens
gtctcgctcttgtcacccaggctggaatgcagtggcgcca

SEQ ID NO: 89539 - DNA, 40 bp, Homo sapiens
tggcgccactgcattccagcctgggtgacaagagcgagac

SEQ ID NO: 89540 - DNA, 40 bp, Homo sapiens
tctcgctcttgtcacccaggctggaatgcagtggcgccat

SEQ ID NO: 89541 - DNA, 40 bp, Homo sapiens
atggcgccactgcattccagcctgggtgacaagagcgaga

SEQ ID NO: 89542 - DNA, 40 bp, Homo sapiens
ctcgctcttgtcacccaggctggaatgcagtggcgccatc

SEQ ID NO: 89543 - DNA, 40 bp, Homo sapiens
gatggcgccactgcattccagcctgggtgacaagagcgag

SEQ ID NO: 89544 - DNA, 40 bp, Homo sapiens
tcgctcttgtcacccaggctggaatgcagtggcgccatct

SEQ ID NO: 89545 - DNA, 40 bp, Homo sapiens
agatggcgccactgcattccagcctgggtgacaagagcga

SEQ ID NO: 89546 - DNA, 40 bp, Homo sapiens
cgctcttgtcacccaggctggaatgcagtggcgccatctc

SEQ ID NO: 89547 - DNA, 40 bp, Homo sapiens
gagatggcgccactgcattccagcctgggtgacaagagcg

SEQ ID NO: 89548 - DNA, 40 bp, Homo sapiens
gctcttgtcacccaggctggaatgcagtggcgccatctca

SEQ ID NO: 89549 - DNA, 40 bp, Homo sapiens
tgagatggcgccactgcattccagcctgggtgacaagagc

SEQ ID NO: 89550 - DNA, 40 bp, Homo sapiens
ctcttgtcacccaggctggaatgcagtggcgccatctcag

SEQ ID NO: 89551 - DNA, 40 bp, Homo sapiens
ctgagatggcgccactgcattccagcctgggtgacaagag

SEQ ID NO: 89552 - DNA, 40 bp, Homo sapiens
tcttgtcacccaggctggaatgcagtggcgccatctcagc

SEQ ID NO: 89553 - DNA, 40 bp, Homo sapiens
gctgagatggcgccactgcattccagcctgggtgacaaga

SEQ ID NO: 89554 - DNA, 40 bp, Homo sapiens
cttgtcacccaggctggaatgcagtggcgccatctcagct

SEQ ID NO: 89555 - DNA, 40 bp, Homo sapiens
agctgagatggcgccactgcattccagcctgggtgacaag

SEQ ID NO: 89556 - DNA, 40 bp, Homo sapiens
ttgtcacccaggctggaatgcagtggcgccatctcagctc

SEQ ID NO: 89557 - DNA, 40 bp, Homo sapiens
gagctgagatggcgccactgcattccagcctgggtgacaa

SEQ ID NO: 89558 - DNA, 40 bp, Homo sapiens
tgtcacccaggctggaatgcagtggcgccatctcagctca

SEQ ID NO: 89559 - DNA, 40 bp, Homo sapiens
tgagctgagatggcgccactgcattccagcctgggtgaca

SEQ ID NO: 89560 - DNA, 40 bp, Homo sapiens
gtcacccaggctggaatgcagtggcgccatctcagctcac

SEQ ID NO: 89561 - DNA, 40 bp, Homo sapiens
gtgagctgagatggcgccactgcattccagcctgggtgac

SEQ ID NO: 89562 - DNA, 40 bp, Homo sapiens
tcacccaggctggaatgcagtggcgccatctcagctcact

SEQ ID NO: 89563 - DNA, 40 bp, Homo sapiens
agtgagctgagatggcgccactgcattccagcctgggtga

SEQ ID NO: 89564 - DNA, 40 bp, Homo sapiens
cacccaggctggaatgcagtggcgccatctcagctcactg

SEQ ID NO: 89565 - DNA, 40 bp, Homo sapiens
cagtgagctgagatggcgccactgcattccagcctgggtg

SEQ ID NO: 89566 - DNA, 40 bp, Homo sapiens
acccaggctggaatgcagtggcgccatctcagctcactgc

SEQ ID NO: 89567 - DNA, 40 bp, Homo sapiens
gcagtgagctgagatggcgccactgcattccagcctgggt

SEQ ID NO: 89568 - DNA, 40 bp, Homo sapiens
cccaggctggaatgcagtggcgccatctcagctcactgca

SEQ ID NO: 89569 - DNA, 40 bp, Homo sapiens
tgcagtgagctgagatggcgccactgcattccagcctggg

SEQ ID NO: 89570 - DNA, 40 bp, Homo sapiens
ccaggctggaatgcagtggcgccatctcagctcactgcaa

SEQ ID NO: 89571 - DNA, 40 bp, Homo sapiens
ttgcagtgagctgagatggcgccactgcattccagcctgg

SEQ ID NO: 89572 - DNA, 40 bp, Homo sapiens
caggctggaatgcagtggcgccatctcagctcactgcaac

SEQ ID NO: 89573 - DNA, 40 bp, Homo sapiens
gttgcagtgagctgagatggcgccactgcattccagcctg

SEQ ID NO: 89574 - DNA, 40 bp, Homo sapiens
aggctggaatgcagtggcgccatctcagctcactgcaacc

SEQ ID NO: 89575 - DNA, 40 bp, Homo sapiens
ggttgcagtgagctgagatggcgccactgcattccagcct

SEQ ID NO: 89576 - DNA, 40 bp, Homo sapiens
ggctggaatgcagtggcgccatctcagctcactgcaacct

SEQ ID NO: 89577 - DNA, 40 bp, Homo sapiens
aggttgcagtgagctgagatggcgccactgcattccagcc

SEQ ID NO: 89578 - DNA, 40 bp, Homo sapiens
gctggaatgcagtggcgccatctcagctcactgcaacctc

SEQ ID NO: 89579 - DNA, 40 bp, Homo sapiens
gaggttgcagtgagctgagatggcgccactgcattccagc

SEQ ID NO: 89580 - DNA, 40 bp, Homo sapiens
ctggaatgcagtggcgccatctcagctcactgcaacctcc

SEQ ID NO: 89581 - DNA, 40 bp, Homo sapiens
ggaggttgcagtgagctgagatggcgccactgcattccag

SEQ ID NO: 89582 - DNA, 40 bp, Homo sapiens
tggaatgcagtggcgccatctcagctcactgcaacctcca

SEQ ID NO: 89583 - DNA, 40 bp, Homo sapiens
tggaggttgcagtgagctgagatggcgccactgcattcca

SEQ ID NO: 89584 - DNA, 40 bp, Homo sapiens
ggaatgcagtggcgccatctcagctcactgcaacctccat

SEQ ID NO: 89585 - DNA, 40 bp, Homo sapiens
atggaggttgcagtgagctgagatggcgccactgcattcc

SEQ ID NO: 89586 - DNA, 40 bp, Homo sapiens
gaatgcagtggcgccatctcagctcactgcaacctccatc

SEQ ID NO: 89587 - DNA, 40 bp, Homo sapiens
gatggaggttgcagtgagctgagatggcgccactgcattc

SEQ ID NO: 89588 - DNA, 40 bp, Homo sapiens
aatgcagtggcgccatctcagctcactgcaacctccatct

SEQ ID NO: 89589 - DNA, 40 bp, Homo sapiens
agatggaggttgcagtgagctgagatggcgccactgcatt

SEQ ID NO: 89590 - DNA, 40 bp, Homo sapiens
atgcagtggcgccatctcagctcactgcaacctccatctc

SEQ ID NO: 89591 - DNA, 40 bp, Homo sapiens
gagatggaggttgcagtgagctgagatggcgccactgcat

SEQ ID NO: 89592 - DNA, 40 bp, Homo sapiens
tgcagtggcgccatctcagctcactgcaacctccatctcc

SEQ ID NO: 89593 - DNA, 40 bp, Homo sapiens
ggagatggaggttgcagtgagctgagatggcgccactgca

SEQ ID NO: 89594 - DNA, 40 bp, Homo sapiens
gcagtggcgccatctcagctcactgcaacctccatctccc

SEQ ID NO: 89595 - DNA, 40 bp, Homo sapiens
gggagatggaggttgcagtgagctgagatggcgccactgc

SEQ ID NO: 89596 - DNA, 40 bp, Homo sapiens
cagtggcgccatctcagctcactgcaacctccatctccca

SEQ ID NO: 89597 - DNA, 40 bp, Homo sapiens
tgggagatggaggttgcagtgagctgagatggcgccactg

SEQ ID NO: 89598 - DNA, 40 bp, Homo sapiens
agtggcgccatctcagctcactgcaacctccatctcccag

SEQ ID NO: 89599 - DNA, 40 bp, Homo sapiens
ctgggagatggaggttgcagtgagctgagatggcgccact

SEQ ID NO: 89600 - DNA, 40 bp, Homo sapiens
gtggcgccatctcagctcactgcaacctccatctcccagg

SEQ ID NO: 89601 - DNA, 40 bp, Homo sapiens
cctgggagatggaggttgcagtgagctgagatggcgccac

SEQ ID NO: 89602 - DNA, 40 bp, Homo sapiens
tggcgccatctcagctcactgcaacctccatctcccaggt

SEQ ID NO: 89603 - DNA, 40 bp, Homo sapiens
acctgggagatggaggttgcagtgagctgagatggcgcca

SEQ ID NO: 89604 - DNA, 40 bp, Homo sapiens
ggcgccatctcagctcactgcaacctccatctcccaggtt

SEQ ID NO: 89605 - DNA, 40 bp, Homo sapiens
aacctgggagatggaggttgcagtgagctgagatggcgcc

SEQ ID NO: 89606 - DNA, 40 bp, Homo sapiens
gcgccatctcagctcactgcaacctccatctcccaggttc

SEQ ID NO: 89607 - DNA, 40 bp, Homo sapiens
gaacctgggagatggaggttgcagtgagctgagatggcgc

SEQ ID NO: 89608 - DNA, 40 bp, Homo sapiens
cgccatctcagctcactgcaacctccatctcccaggttca

SEQ ID NO: 89609 - DNA, 40 bp, Homo sapiens
tgaacctgggagatggaggttgcagtgagctgagatggcg

SEQ ID NO: 89610 - DNA, 40 bp, Homo sapiens
gccatctcagctcactgcaacctccatctcccaggttcaa

SEQ ID NO: 89611 - DNA, 40 bp, Homo sapiens
ttgaacctgggagatggaggttgcagtgagctgagatggc

SEQ ID NO: 89612 - DNA, 40 bp, Homo sapiens
ccatctcagctcactgcaacctccatctcccaggttcaag

SEQ ID NO: 89613 - DNA, 40 bp, Homo sapiens
cttgaacctgggagatggaggttgcagtgagctgagatgg

SEQ ID NO: 89614 - DNA, 40 bp, Homo sapiens
catctcagctcactgcaacctccatctcccaggttcaagc

SEQ ID NO: 89615 - DNA, 40 bp, Homo sapiens
gcttgaacctgggagatggaggttgcagtgagctgagatg

SEQ ID NO: 89616 - DNA, 40 bp, Homo sapiens
atctcagctcactgcaacctccatctcccaggttcaagcg

SEQ ID NO: 89617 - DNA, 40 bp, Homo sapiens
cgcttgaacctgggagatggaggttgcagtgagctgagat

SEQ ID NO: 89618 - DNA, 40 bp, Homo sapiens
tctcagctcactgcaacctccatctcccaggttcaagcga

SEQ ID NO: 89619 - DNA, 40 bp, Homo sapiens
tcgcttgaacctgggagatggaggttgcagtgagctgaga

SEQ ID NO: 89620 - DNA, 40 bp, Homo sapiens
ctcagctcactgcaacctccatctcccaggttcaagcgat

SEQ ID NO: 89621 - DNA, 40 bp, Homo sapiens
atcgcttgaacctgggagatggaggttgcagtgagctgag

SEQ ID NO: 89622 - DNA, 40 bp, Homo sapiens
tcagctcactgcaacctccatctcccaggttcaagcgatt

SEQ ID NO: 89623 - DNA, 40 bp, Homo sapiens
aatcgcttgaacctgggagatggaggttgcagtgagctga

SEQ ID NO: 89624 - DNA, 40 bp, Homo sapiens
cagctcactgcaacctccatctcccaggttcaagcgattc

SEQ ID NO: 89625 - DNA, 40 bp, Homo sapiens
gaatcgcttgaacctgggagatggaggttgcagtgagctg

SEQ ID NO: 89626 - DNA, 40 bp, Homo sapiens
agctcactgcaacctccatctcccaggttcaagcgattct

SEQ ID NO: 89627 - DNA, 40 bp, Homo sapiens
agaatcgcttgaacctgggagatggaggttgcagtgagct

SEQ ID NO: 89628 - DNA, 40 bp, Homo sapiens
gctcactgcaacctccatctcccaggttcaagcgattctc

SEQ ID NO: 89629 - DNA, 40 bp, Homo sapiens
gagaatcgcttgaacctgggagatggaggttgcagtgagc

SEQ ID NO: 89630 - DNA, 40 bp, Homo sapiens
ctcactgcaacctccatctcccaggttcaagcgattctcg

SEQ ID NO: 89631 - DNA, 40 bp, Homo sapiens
cgagaatcgcttgaacctgggagatggaggttgcagtgag

SEQ ID NO: 89632 - DNA, 40 bp, Homo sapiens
tcactgcaacctccatctcccaggttcaagcgattctcgt

SEQ ID NO: 89633 - DNA, 40 bp, Homo sapiens
acgagaatcgcttgaacctgggagatggaggttgcagtga

SEQ ID NO: 89634 - DNA, 40 bp, Homo sapiens
cactgcaacctccatctcccaggttcaagcgattctcgtg

SEQ ID NO: 89635 - DNA, 40 bp, Homo sapiens
cacgagaatcgcttgaacctgggagatggaggttgcagtg

SEQ ID NO: 89636 - DNA, 40 bp, Homo sapiens
actgcaacctccatctcccaggttcaagcgattctcgtgc

SEQ ID NO: 89637 - DNA, 40 bp, Homo sapiens
gcacgagaatcgcttgaacctgggagatggaggttgcagt

SEQ ID NO: 89638 - DNA, 40 bp, Homo sapiens
ctgcaacctccatctcccaggttcaagcgattctcgtgcc

SEQ ID NO: 89639 - DNA, 40 bp, Homo sapiens
ggcacgagaatcgcttgaacctgggagatggaggttgcag

SEQ ID NO: 89640 - DNA, 40 bp, Homo sapiens
tgcaacctccatctcccaggttcaagcgattctcgtgcct

SEQ ID NO: 89641 - DNA, 40 bp, Homo sapiens
aggcacgagaatcgcttgaacctgggagatggaggttgca

SEQ ID NO: 89642 - DNA, 40 bp, Homo sapiens
gcaacctccatctcccaggttcaagcgattctcgtgcctc

SEQ ID NO: 89643 - DNA, 40 bp, Homo sapiens
gaggcacgagaatcgcttgaacctgggagatggaggttgc

SEQ ID NO: 89644 - DNA, 40 bp, Homo sapiens
caacctccatctcccaggttcaagcgattctcgtgcctcg

SEQ ID NO: 89645 - DNA, 40 bp, Homo sapiens
cgaggcacgagaatcgcttgaacctgggagatggaggttg

SEQ ID NO: 89646 - DNA, 40 bp, Homo sapiens
aacctccatctcccaggttcaagcgattctcgtgcctcgg

SEQ ID NO: 89647 - DNA, 40 bp, Homo sapiens
ccgaggcacgagaatcgcttgaacctgggagatggaggtt

SEQ ID NO: 89648 - DNA, 40 bp, Homo sapiens
acctccatctcccaggttcaagcgattctcgtgcctcggc

SEQ ID NO: 89649 - DNA, 40 bp, Homo sapiens
gccgaggcacgagaatcgcttgaacctgggagatggaggt

SEQ ID NO: 89650 - DNA, 40 bp, Homo sapiens
cctccatctcccaggttcaagcgattctcgtgcctcggcc

SEQ ID NO: 89651 - DNA, 40 bp, Homo sapiens
ggccgaggcacgagaatcgcttgaacctgggagatggagg

SEQ ID NO: 89652 - DNA, 40 bp, Homo sapiens
ctccatctcccaggttcaagcgattctcgtgcctcggcct

SEQ ID NO: 89653 - DNA, 40 bp, Homo sapiens
aggccgaggcacgagaatcgcttgaacctgggagatggag

SEQ ID NO: 89654 - DNA, 40 bp, Homo sapiens
tccatctcccaggttcaagcgattctcgtgcctcggcctc

SEQ ID NO: 89655 - DNA, 40 bp, Homo sapiens
gaggccgaggcacgagaatcgcttgaacctgggagatgga

SEQ ID NO: 89656 - DNA, 40 bp, Homo sapiens
ccatctcccaggttcaagcgattctcgtgcctcggcctcc

SEQ ID NO: 89657 - DNA, 40 bp, Homo sapiens
ggaggccgaggcacgagaatcgcttgaacctgggagatgg

SEQ ID NO: 89658 - DNA, 40 bp, Homo sapiens
catctcccaggttcaagcgattctcgtgcctcggcctcct

SEQ ID NO: 89659 - DNA, 40 bp, Homo sapiens
aggaggccgaggcacgagaatcgcttgaacctgggagatg

SEQ ID NO: 89660 - DNA, 40 bp, Homo sapiens
atctcccaggttcaagcgattctcgtgcctcggcctcctg

SEQ ID NO: 89661 - DNA, 40 bp, Homo sapiens
caggaggccgaggcacgagaatcgcttgaacctgggagat

SEQ ID NO: 89662 - DNA, 40 bp, Homo sapiens
tctcccaggttcaagcgattctcgtgcctcggcctcctga

SEQ ID NO: 89663 - DNA, 40 bp, Homo sapiens
tcaggaggccgaggcacgagaatcgcttgaacctgggaga

SEQ ID NO: 89664 - DNA, 40 bp, Homo sapiens
ctcccaggttcaagcgattctcgtgcctcggcctcctgag

SEQ ID NO: 89665 - DNA, 40 bp, Homo sapiens
ctcaggaggccgaggcacgagaatcgcttgaacctgggag

SEQ ID NO: 89666 - DNA, 40 bp, Homo sapiens
tcccaggttcaagcgattctcgtgcctcggcctcctgagt

SEQ ID NO: 89667 - DNA, 40 bp, Homo sapiens
actcaggaggccgaggcacgagaatcgcttgaacctggga

SEQ ID NO: 89668 - DNA, 40 bp, Homo sapiens
cccaggttcaagcgattctcgtgcctcggcctcctgagta

SEQ ID NO: 89669 - DNA, 40 bp, Homo sapiens
tactcaggaggccgaggcacgagaatcgcttgaacctggg

SEQ ID NO: 89670 - DNA, 40 bp, Homo sapiens
ccaggttcaagcgattctcgtgcctcggcctcctgagtag

SEQ ID NO: 89671 - DNA, 40 bp, Homo sapiens
ctactcaggaggccgaggcacgagaatcgcttgaacctgg

SEQ ID NO: 89672 - DNA, 40 bp, Homo sapiens
caggttcaagcgattctcgtgcctcggcctcctgagtagc

SEQ ID NO: 89673 - DNA, 40 bp, Homo sapiens
gctactcaggaggccgaggcacgagaatcgcttgaacctg

SEQ ID NO: 89674 - DNA, 40 bp, Homo sapiens
aggttcaagcgattctcgtgcctcggcctcctgagtagct

SEQ ID NO: 89675 - DNA, 40 bp, Homo sapiens
agctactcaggaggccgaggcacgagaatcgcttgaacct

SEQ ID NO: 89676 - DNA, 40 bp, Homo sapiens
ggttcaagcgattctcgtgcctcggcctcctgagtagctg

SEQ ID NO: 89677 - DNA, 40 bp, Homo sapiens
cagctactcaggaggccgaggcacgagaatcgcttgaacc

SEQ ID NO: 89678 - DNA, 40 bp, Homo sapiens
gttcaagcgattctcgtgcctcggcctcctgagtagctgg

SEQ ID NO: 89679 - DNA, 40 bp, Homo sapiens
ccagctactcaggaggccgaggcacgagaatcgcttgaac

SEQ ID NO: 89680 - DNA, 40 bp, Homo sapiens
ttcaagcgattctcgtgcctcggcctcctgagtagctggg

SEQ ID NO: 89681 - DNA, 40 bp, Homo sapiens
cccagctactcaggaggccgaggcacgagaatcgcttgaa

SEQ ID NO: 89682 - DNA, 40 bp, Homo sapiens
tcaagcgattctcgtgcctcggcctcctgagtagctggga

SEQ ID NO: 89683 - DNA, 40 bp, Homo sapiens
tcccagctactcaggaggccgaggcacgagaatcgcttga

SEQ ID NO: 89684 - DNA, 40 bp, Homo sapiens
caagcgattctcgtgcctcggcctcctgagtagctgggat

SEQ ID NO: 89685 - DNA, 40 bp, Homo sapiens
atcccagctactcaggaggccgaggcacgagaatcgcttg

SEQ ID NO: 89686 - DNA, 40 bp, Homo sapiens
aagcgattctcgtgcctcggcctcctgagtagctgggatt

SEQ ID NO: 89687 - DNA, 40 bp, Homo sapiens
aatcccagctactcaggaggccgaggcacgagaatcgctt

SEQ ID NO: 89688 - DNA, 40 bp, Homo sapiens
agcgattctcgtgcctcggcctcctgagtagctgggatta

SEQ ID NO: 89689 - DNA, 40 bp, Homo sapiens
taatcccagctactcaggaggccgaggcacgagaatcgct

SEQ ID NO: 89690 - DNA, 40 bp, Homo sapiens
gcgattctcgtgcctcggcctcctgagtagctgggattac

SEQ ID NO: 89691 - DNA, 40 bp, Homo sapiens
gtaatcccagctactcaggaggccgaggcacgagaatcgc

SEQ ID NO: 89692 - DNA, 40 bp, Homo sapiens
cgattctcgtgcctcggcctcctgagtagctgggattaca

SEQ ID NO: 89693 - DNA, 40 bp, Homo sapiens
tgtaatcccagctactcaggaggccgaggcacgagaatcg

SEQ ID NO: 89694 - DNA, 40 bp, Homo sapiens
gattctcgtgcctcggcctcctgagtagctgggattacag

SEQ ID NO: 89695 - DNA, 40 bp, Homo sapiens
ctgtaatcccagctactcaggaggccgaggcacgagaatc

SEQ ID NO: 89696 - DNA, 40 bp, Homo sapiens
attctcgtgcctcggcctcctgagtagctgggattacagg

SEQ ID NO: 89697 - DNA, 40 bp, Homo sapiens
cctgtaatcccagctactcaggaggccgaggcacgagaat

SEQ ID NO: 89698 - DNA, 40 bp, Homo sapiens
ttctcgtgcctcggcctcctgagtagctgggattacaggc

SEQ ID NO: 89699 - DNA, 40 bp, Homo sapiens
gcctgtaatcccagctactcaggaggccgaggcacgagaa

SEQ ID NO: 89700 - DNA, 40 bp, Homo sapiens
tctcgtgcctcggcctcctgagtagctgggattacaggcg

SEQ ID NO: 89701 - DNA, 40 bp, Homo sapiens
cgcctgtaatcccagctactcaggaggccgaggcacgaga

SEQ ID NO: 89702 - DNA, 40 bp, Homo sapiens
ctcgtgcctcggcctcctgagtagctgggattacaggcgt

SEQ ID NO: 89703 - DNA, 40 bp, Homo sapiens
acgcctgtaatcccagctactcaggaggccgaggcacgag

SEQ ID NO: 89704 - DNA, 40 bp, Homo sapiens
tcgtgcctcggcctcctgagtagctgggattacaggcgtg

SEQ ID NO: 89705 - DNA, 40 bp, Homo sapiens
cacgcctgtaatcccagctactcaggaggccgaggcacga

SEQ ID NO: 89706 - DNA, 40 bp, Homo sapiens
cgtgcctcggcctcctgagtagctgggattacaggcgtgt

SEQ ID NO: 89707 - DNA, 40 bp, Homo sapiens
acacgcctgtaatcccagctactcaggaggccgaggcacg

SEQ ID NO: 89708 - DNA, 40 bp, Homo sapiens
gtgcctcggcctcctgagtagctgggattacaggcgtgtg

SEQ ID NO: 89709 - DNA, 40 bp, Homo sapiens
cacacgcctgtaatcccagctactcaggaggccgaggcac

SEQ ID NO: 89710 - DNA, 40 bp, Homo sapiens
tgcctcggcctcctgagtagctgggattacaggcgtgtgc

SEQ ID NO: 89711 - DNA, 40 bp, Homo sapiens
gcacacgcctgtaatcccagctactcaggaggccgaggca

SEQ ID NO: 89712 - DNA, 40 bp, Homo sapiens
gcctcggcctcctgagtagctgggattacaggcgtgtgcc

SEQ ID NO: 89713 - DNA, 40 bp, Homo sapiens
ggcacacgcctgtaatcccagctactcaggaggccgaggc

SEQ ID NO: 89714 - DNA, 40 bp, Homo sapiens
cctcggcctcctgagtagctgggattacaggcgtgtgcca

SEQ ID NO: 89715 - DNA, 40 bp, Homo sapiens
tggcacacgcctgtaatcccagctactcaggaggccgagg

SEQ ID NO: 89716 - DNA, 40 bp, Homo sapiens
ctcggcctcctgagtagctgggattacaggcgtgtgccac

SEQ ID NO: 89717 - DNA, 40 bp, Homo sapiens
gtggcacacgcctgtaatcccagctactcaggaggccgag

SEQ ID NO: 89718 - DNA, 40 bp, Homo sapiens
tcggcctcctgagtagctgggattacaggcgtgtgccact

SEQ ID NO: 89719 - DNA, 40 bp, Homo sapiens
agtggcacacgcctgtaatcccagctactcaggaggccga

SEQ ID NO: 89720 - DNA, 40 bp, Homo sapiens
cggcctcctgagtagctgggattacaggcgtgtgccacta

SEQ ID NO: 89721 - DNA, 40 bp, Homo sapiens
tagtggcacacgcctgtaatcccagctactcaggaggccg

SEQ ID NO: 89722 - DNA, 40 bp, Homo sapiens
ggcctcctgagtagctgggattacaggcgtgtgccactac

SEQ ID NO: 89723 - DNA, 40 bp, Homo sapiens
gtagtggcacacgcctgtaatcccagctactcaggaggcc

SEQ ID NO: 89724 - DNA, 40 bp, Homo sapiens
gcctcctgagtagctgggattacaggcgtgtgccactaca

SEQ ID NO: 89725 - DNA, 40 bp, Homo sapiens
tgtagtggcacacgcctgtaatcccagctactcaggaggc

SEQ ID NO: 89726 - DNA, 40 bp, Homo sapiens
cctcctgagtagctgggattacaggcgtgtgccactacac

SEQ ID NO: 89727 - DNA, 40 bp, Homo sapiens
gtgtagtggcacacgcctgtaatcccagctactcaggagg

SEQ ID NO: 89728 - DNA, 40 bp, Homo sapiens
ctcctgagtagctgggattacaggcgtgtgccactacact

SEQ ID NO: 89729 - DNA, 40 bp, Homo sapiens
agtgtagtggcacacgcctgtaatcccagctactcaggag

SEQ ID NO: 89730 - DNA, 40 bp, Homo sapiens
tcctgagtagctgggattacaggcgtgtgccactacactc

SEQ ID NO: 89731 - DNA, 40 bp, Homo sapiens
gagtgtagtggcacacgcctgtaatcccagctactcagga

SEQ ID NO: 89732 - DNA, 40 bp, Homo sapiens
cctgagtagctgggattacaggcgtgtgccactacactca

SEQ ID NO: 89733 - DNA, 40 bp, Homo sapiens
tgagtgtagtggcacacgcctgtaatcccagctactcagg

SEQ ID NO: 89734 - DNA, 40 bp, Homo sapiens
ctgagtagctgggattacaggcgtgtgccactacactcaa

SEQ ID NO: 89735 - DNA, 40 bp, Homo sapiens
ttgagtgtagtggcacacgcctgtaatcccagctactcag

SEQ ID NO: 89736 - DNA, 40 bp, Homo sapiens
tgagtagctgggattacaggcgtgtgccactacactcaac

SEQ ID NO: 89737 - DNA, 40 bp, Homo sapiens
gttgagtgtagtggcacacgcctgtaatcccagctactca

SEQ ID NO: 89738 - DNA, 40 bp, Homo sapiens
gagtagctgggattacaggcgtgtgccactacactcaact

SEQ ID NO: 89739 - DNA, 40 bp, Homo sapiens
agttgagtgtagtggcacacgcctgtaatcccagctactc

SEQ ID NO: 89740 - DNA, 40 bp, Homo sapiens
agtagctgggattacaggcgtgtgccactacactcaacta

SEQ ID NO: 89741 - DNA, 40 bp, Homo sapiens
tagttgagtgtagtggcacacgcctgtaatcccagctact

SEQ ID NO: 89742 - DNA, 40 bp, Homo sapiens
gtagctgggattacaggcgtgtgccactacactcaactaa

SEQ ID NO: 89743 - DNA, 40 bp, Homo sapiens
ttagttgagtgtagtggcacacgcctgtaatcccagctac

SEQ ID NO: 89744 - DNA, 40 bp, Homo sapiens
tagctgggattacaggcgtgtgccactacactcaactaat

SEQ ID NO: 89745 - DNA, 40 bp, Homo sapiens
attagttgagtgtagtggcacacgcctgtaatcccagcta

SEQ ID NO: 89746 - DNA, 40 bp, Homo sapiens
agctgggattacaggcgtgtgccactacactcaactaatt

SEQ ID NO: 89747 - DNA, 40 bp, Homo sapiens
aattagttgagtgtagtggcacacgcctgtaatcccagct

SEQ ID NO: 89748 - DNA, 40 bp, Homo sapiens
gctgggattacaggcgtgtgccactacactcaactaattt

SEQ ID NO: 89749 - DNA, 40 bp, Homo sapiens
aaattagttgagtgtagtggcacacgcctgtaatcccagc

SEQ ID NO: 89750 - DNA, 40 bp, Homo sapiens
ctgggattacaggcgtgtgccactacactcaactaatttt

SEQ ID NO: 89751 - DNA, 40 bp, Homo sapiens
aaaattagttgagtgtagtggcacacgcctgtaatcccag

SEQ ID NO: 89752 - DNA, 40 bp, Homo sapiens
tgggattacaggcgtgtgccactacactcaactaattttt

SEQ ID NO: 89753 - DNA, 40 bp, Homo sapiens
aaaaattagttgagtgtagtggcacacgcctgtaatccca

SEQ ID NO: 89754 - DNA, 40 bp, Homo sapiens
gggattacaggcgtgtgccactacactcaactaatttttg

SEQ ID NO: 89755 - DNA, 40 bp, Homo sapiens
caaaaattagttgagtgtagtggcacacgcctgtaatccc

SEQ ID NO: 89756 - DNA, 40 bp, Homo sapiens
ggattacaggcgtgtgccactacactcaactaatttttgt

SEQ ID NO: 89757 - DNA, 40 bp, Homo sapiens
acaaaaattagttgagtgtagtggcacacgcctgtaatcc

SEQ ID NO: 89758 - DNA, 40 bp, Homo sapiens
gattacaggcgtgtgccactacactcaactaatttttgta

SEQ ID NO: 89759 - DNA, 40 bp, Homo sapiens
tacaaaaattagttgagtgtagtggcacacgcctgtaatc

SEQ ID NO: 89760 - DNA, 40 bp, Homo sapiens
attacaggcgtgtgccactacactcaactaatttttgtat

SEQ ID NO: 89761 - DNA, 40 bp, Homo sapiens
atacaaaaattagttgagtgtagtggcacacgcctgtaat

SEQ ID NO: 89762 - DNA, 40 bp, Homo sapiens
ttacaggcgtgtgccactacactcaactaatttttgtatt

SEQ ID NO: 89763 - DNA, 40 bp, Homo sapiens
aatacaaaaattagttgagtgtagtggcacacgcctgtaa

SEQ ID NO: 89764 - DNA, 40 bp, Homo sapiens
tacaggcgtgtgccactacactcaactaatttttgtattt

SEQ ID NO: 89765 - DNA, 40 bp, Homo sapiens
aaatacaaaaattagttgagtgtagtggcacacgcctgta

SEQ ID NO: 89766 - DNA, 40 bp, Homo sapiens
acaggcgtgtgccactacactcaactaatttttgtatttt

SEQ ID NO: 89767 - DNA, 40 bp, Homo sapiens
aaaatacaaaaattagttgagtgtagtggcacacgcctgt

SEQ ID NO: 89768 - DNA, 40 bp, Homo sapiens
caggcgtgtgccactacactcaactaatttttgtattttt

SEQ ID NO: 89769 - DNA, 40 bp, Homo sapiens
aaaaatacaaaaattagttgagtgtagtggcacacgcctg

SEQ ID NO: 89770 - DNA, 40 bp, Homo sapiens
aggcgtgtgccactacactcaactaatttttgtattttta

SEQ ID NO: 89771 - DNA, 40 bp, Homo sapiens
taaaaatacaaaaattagttgagtgtagtggcacacgcct

SEQ ID NO: 89772 - DNA, 40 bp, Homo sapiens
ggcgtgtgccactacactcaactaatttttgtatttttag

SEQ ID NO: 89773 - DNA, 40 bp, Homo sapiens
ctaaaaatacaaaaattagttgagtgtagtggcacacgcc

SEQ ID NO: 89774 - DNA, 40 bp, Homo sapiens
gcgtgtgccactacactcaactaatttttgtatttttagg

SEQ ID NO: 89775 - DNA, 40 bp, Homo sapiens
cctaaaaatacaaaaattagttgagtgtagtggcacacgc

SEQ ID NO: 89776 - DNA, 40 bp, Homo sapiens
cgtgtgccactacactcaactaatttttgtatttttagga

SEQ ID NO: 89777 - DNA, 40 bp, Homo sapiens
tcctaaaaatacaaaaattagttgagtgtagtggcacacg

SEQ ID NO: 89778 - DNA, 40 bp, Homo sapiens
gtgtgccactacactcaactaatttttgtatttttaggag

SEQ ID NO: 89779 - DNA, 40 bp, Homo sapiens
ctcctaaaaatacaaaaattagttgagtgtagtggcacac

SEQ ID NO: 89780 - DNA, 40 bp, Homo sapiens
tgtgccactacactcaactaatttttgtatttttaggaga

SEQ ID NO: 89781 - DNA, 40 bp, Homo sapiens
tctcctaaaaatacaaaaattagttgagtgtagtggcaca

SEQ ID NO: 89782 - DNA, 40 bp, Homo sapiens
gtgccactacactcaactaatttttgtatttttaggagag

SEQ ID NO: 89783 - DNA, 40 bp, Homo sapiens
ctctcctaaaaatacaaaaattagttgagtgtagtggcac

SEQ ID NO: 89784 - DNA, 40 bp, Homo sapiens
tgccactacactcaactaatttttgtatttttaggagaga

SEQ ID NO: 89785 - DNA, 40 bp, Homo sapiens
tctctcctaaaaatacaaaaattagttgagtgtagtggca

SEQ ID NO: 89786 - DNA, 40 bp, Homo sapiens
gccactacactcaactaatttttgtatttttaggagagac

SEQ ID NO: 89787 - DNA, 40 bp, Homo sapiens
gtctctcctaaaaatacaaaaattagttgagtgtagtggc

SEQ ID NO: 89788 - DNA, 40 bp, Homo sapiens
ccactacactcaactaatttttgtatttttaggagagacg

SEQ ID NO: 89789 - DNA, 40 bp, Homo sapiens
cgtctctcctaaaaatacaaaaattagttgagtgtagtgg

SEQ ID NO: 89790 - DNA, 40 bp, Homo sapiens
cactacactcaactaatttttgtatttttaggagagacgg

SEQ ID NO: 89791 - DNA, 40 bp, Homo sapiens
ccgtctctcctaaaaatacaaaaattagttgagtgtagtg

SEQ ID NO: 89792 - DNA, 40 bp, Homo sapiens
actacactcaactaatttttgtatttttaggagagacggg

SEQ ID NO: 89793 - DNA, 40 bp, Homo sapiens
cccgtctctcctaaaaatacaaaaattagttgagtgtagt

SEQ ID NO: 89794 - DNA, 40 bp, Homo sapiens
ctacactcaactaatttttgtatttttaggagagacgggg

SEQ ID NO: 89795 - DNA, 40 bp, Homo sapiens
ccccgtctctcctaaaaatacaaaaattagttgagtgtag

SEQ ID NO: 89796 - DNA, 40 bp, Homo sapiens
tacactcaactaatttttgtatttttaggagagacggggt

SEQ ID NO: 89797 - DNA, 40 bp, Homo sapiens
accccgtctctcctaaaaatacaaaaattagttgagtgta

SEQ ID NO: 89798 - DNA, 40 bp, Homo sapiens
acactcaactaatttttgtatttttaggagagacggggtt

SEQ ID NO: 89799 - DNA, 40 bp, Homo sapiens
aaccccgtctctcctaaaaatacaaaaattagttgagtgt

SEQ ID NO: 89800 - DNA, 40 bp, Homo sapiens
cactcaactaatttttgtatttttaggagagacggggttt

SEQ ID NO: 89801 - DNA, 40 bp, Homo sapiens
aaaccccgtctctcctaaaaatacaaaaattagttgagtg

SEQ ID NO: 89802 - DNA, 40 bp, Homo sapiens
actcaactaatttttgtatttttaggagagacggggtttc

SEQ ID NO: 89803 - DNA, 40 bp, Homo sapiens
gaaaccccgtctctcctaaaaatacaaaaattagttgagt

SEQ ID NO: 89804 - DNA, 40 bp, Homo sapiens
ctcaactaatttttgtatttttaggagagacggggtttca

SEQ ID NO: 89805 - DNA, 40 bp, Homo sapiens
tgaaaccccgtctctcctaaaaatacaaaaattagttgag

SEQ ID NO: 89806 - DNA, 40 bp, Homo sapiens
tcaactaatttttgtatttttaggagagacggggtttcac

SEQ ID NO: 89807 - DNA, 40 bp, Homo sapiens
gtgaaaccccgtctctcctaaaaatacaaaaattagttga

SEQ ID NO: 89808 - DNA, 40 bp, Homo sapiens
caactaatttttgtatttttaggagagacggggtttcacc

SEQ ID NO: 89809 - DNA, 40 bp, Homo sapiens
ggtgaaaccccgtctctcctaaaaatacaaaaattagttg

SEQ ID NO: 89810 - DNA, 40 bp, Homo sapiens
aactaatttttgtatttttaggagagacggggtttcaccc

SEQ ID NO: 89811 - DNA, 40 bp, Homo sapiens
gggtgaaaccccgtctctcctaaaaatacaaaaattagtt

SEQ ID NO: 89812 - DNA, 40 bp, Homo sapiens
actaatttttgtatttttaggagagacggggtttcaccct

SEQ ID NO: 89813 - DNA, 40 bp, Homo sapiens
agggtgaaaccccgtctctcctaaaaatacaaaaattagt

SEQ ID NO: 89814 - DNA, 40 bp, Homo sapiens
ctaatttttgtatttttaggagagacggggtttcaccctg

SEQ ID NO: 89815 - DNA, 40 bp, Homo sapiens
cagggtgaaaccccgtctctcctaaaaatacaaaaattag

SEQ ID NO: 89816 - DNA, 40 bp, Homo sapiens
taatttttgtatttttaggagagacggggtttcaccctgt

SEQ ID NO: 89817 - DNA, 40 bp, Homo sapiens
acagggtgaaaccccgtctctcctaaaaatacaaaaatta

SEQ ID NO: 89818 - DNA, 40 bp, Homo sapiens
aatttttgtatttttaggagagacggggtttcaccctgtt

SEQ ID NO: 89819 - DNA, 40 bp, Homo sapiens
aacagggtgaaaccccgtctctcctaaaaatacaaaaatt

SEQ ID NO: 89820 - DNA, 40 bp, Homo sapiens
atttttgtatttttaggagagacggggtttcaccctgttg

SEQ ID NO: 89821 - DNA, 40 bp, Homo sapiens
caacagggtgaaaccccgtctctcctaaaaatacaaaaat

SEQ ID NO: 89822 - DNA, 40 bp, Homo sapiens
tttttgtatttttaggagagacggggtttcaccctgttgg

SEQ ID NO: 89823 - DNA, 40 bp, Homo sapiens
ccaacagggtgaaaccccgtctctcctaaaaatacaaaaa

SEQ ID NO: 89824 - DNA, 40 bp, Homo sapiens
ttttgtatttttaggagagacggggtttcaccctgttggc

SEQ ID NO: 89825 - DNA, 40 bp, Homo sapiens
gccaacagggtgaaaccccgtctctcctaaaaatacaaaa

SEQ ID NO: 89826 - DNA, 40 bp, Homo sapiens
tttgtatttttaggagagacggggtttcaccctgttggcc

SEQ ID NO: 89827 - DNA, 40 bp, Homo sapiens
ggccaacagggtgaaaccccgtctctcctaaaaatacaaa

SEQ ID NO: 89828 - DNA, 40 bp, Homo sapiens
ttgtatttttaggagagacggggtttcaccctgttggcca

SEQ ID NO: 89829 - DNA, 40 bp, Homo sapiens
tggccaacagggtgaaaccccgtctctcctaaaaatacaa

SEQ ID NO: 89830 - DNA, 40 bp, Homo sapiens
tgtatttttaggagagacggggtttcaccctgttggccag

SEQ ID NO: 89831 - DNA, 40 bp, Homo sapiens
ctggccaacagggtgaaaccccgtctctcctaaaaataca

SEQ ID NO: 89832 - DNA, 40 bp, Homo sapiens
gtatttttaggagagacggggtttcaccctgttggccagg

SEQ ID NO: 89833 - DNA, 40 bp, Homo sapiens
cctggccaacagggtgaaaccccgtctctcctaaaaatac

SEQ ID NO: 89834 - DNA, 40 bp, Homo sapiens
tatttttaggagagacggggtttcaccctgttggccaggc

SEQ ID NO: 89835 - DNA, 40 bp, Homo sapiens
gcctggccaacagggtgaaaccccgtctctcctaaaaata

SEQ ID NO: 89836 - DNA, 40 bp, Homo sapiens
atttttaggagagacggggtttcaccctgttggccaggct

SEQ ID NO: 89837 - DNA, 40 bp, Homo sapiens
agcctggccaacagggtgaaaccccgtctctcctaaaaat

SEQ ID NO: 89838 - DNA, 40 bp, Homo sapiens
tttttaggagagacggggtttcaccctgttggccaggctg

SEQ ID NO: 89839 - DNA, 40 bp, Homo sapiens
cagcctggccaacagggtgaaaccccgtctctcctaaaaa

SEQ ID NO: 89840 - DNA, 40 bp, Homo sapiens
ttttaggagagacggggtttcaccctgttggccaggctgg

SEQ ID NO: 89841 - DNA, 40 bp, Homo sapiens
ccagcctggccaacagggtgaaaccccgtctctcctaaaa

SEQ ID NO: 89842 - DNA, 40 bp, Homo sapiens
tttaggagagacggggtttcaccctgttggccaggctggt

SEQ ID NO: 89843 - DNA, 40 bp, Homo sapiens
accagcctggccaacagggtgaaaccccgtctctcctaaa

SEQ ID NO: 89844 - DNA, 40 bp, Homo sapiens
ttaggagagacggggtttcaccctgttggccaggctggtc

SEQ ID NO: 89845 - DNA, 40 bp, Homo sapiens
gaccagcctggccaacagggtgaaaccccgtctctcctaa

SEQ ID NO: 89846 - DNA, 40 bp, Homo sapiens
taggagagacggggtttcaccctgttggccaggctggtct

SEQ ID NO: 89847 - DNA, 40 bp, Homo sapiens
agaccagcctggccaacagggtgaaaccccgtctctccta

SEQ ID NO: 89848 - DNA, 40 bp, Homo sapiens
aggagagacggggtttcaccctgttggccaggctggtctc

SEQ ID NO: 89849 - DNA, 40 bp, Homo sapiens
gagaccagcctggccaacagggtgaaaccccgtctctcct

SEQ ID NO: 89850 - DNA, 40 bp, Homo sapiens
ggagagacggggtttcaccctgttggccaggctggtctcg

SEQ ID NO: 89851 - DNA, 40 bp, Homo sapiens
cgagaccagcctggccaacagggtgaaaccccgtctctcc

SEQ ID NO: 89852 - DNA, 40 bp, Homo sapiens
gagagacggggtttcaccctgttggccaggctggtctcga

SEQ ID NO: 89853 - DNA, 40 bp, Homo sapiens
tcgagaccagcctggccaacagggtgaaaccccgtctctc

SEQ ID NO: 89854 - DNA, 40 bp, Homo sapiens
agagacggggtttcaccctgttggccaggctggtctcgaa

SEQ ID NO: 89855 - DNA, 40 bp, Homo sapiens
ttcgagaccagcctggccaacagggtgaaaccccgtctct

SEQ ID NO: 89856 - DNA, 40 bp, Homo sapiens
gagacggggtttcaccctgttggccaggctggtctcgaac

SEQ ID NO: 89857 - DNA, 40 bp, Homo sapiens
gttcgagaccagcctggccaacagggtgaaaccccgtctc

SEQ ID NO: 89858 - DNA, 40 bp, Homo sapiens
agacggggtttcaccctgttggccaggctggtctcgaact

SEQ ID NO: 89859 - DNA, 40 bp, Homo sapiens
agttcgagaccagcctggccaacagggtgaaaccccgtct

SEQ ID NO: 89860 - DNA, 40 bp, Homo sapiens
gacggggtttcaccctgttggccaggctggtctcgaactc

SEQ ID NO: 89861 - DNA, 40 bp, Homo sapiens
gagttcgagaccagcctggccaacagggtgaaaccccgtc

SEQ ID NO: 89862 - DNA, 40 bp, Homo sapiens
acggggtttcaccctgttggccaggctggtctcgaactcc

SEQ ID NO: 89863 - DNA, 40 bp, Homo sapiens
ggagttcgagaccagcctggccaacagggtgaaaccccgt

SEQ ID NO: 89864 - DNA, 40 bp, Homo sapiens
cggggtttcaccctgttggccaggctggtctcgaactcct

SEQ ID NO: 89865 - DNA, 40 bp, Homo sapiens
aggagttcgagaccagcctggccaacagggtgaaaccccg

SEQ ID NO: 89866 - DNA, 40 bp, Homo sapiens
ggggtttcaccctgttggccaggctggtctcgaactcctg

SEQ ID NO: 89867 - DNA, 40 bp, Homo sapiens
caggagttcgagaccagcctggccaacagggtgaaacccc

SEQ ID NO: 89868 - DNA, 40 bp, Homo sapiens
gggtttcaccctgttggccaggctggtctcgaactcctga

SEQ ID NO: 89869 - DNA, 40 bp, Homo sapiens
tcaggagttcgagaccagcctggccaacagggtgaaaccc

SEQ ID NO: 89870 - DNA, 40 bp, Homo sapiens
ggtttcaccctgttggccaggctggtctcgaactcctgac

SEQ ID NO: 89871 - DNA, 40 bp, Homo sapiens
gtcaggagttcgagaccagcctggccaacagggtgaaacc

SEQ ID NO: 89872 - DNA, 40 bp, Homo sapiens
gtttcaccctgttggccaggctggtctcgaactcctgacc

SEQ ID NO: 89873 - DNA, 40 bp, Homo sapiens
ggtcaggagttcgagaccagcctggccaacagggtgaaac

SEQ ID NO: 89874 - DNA, 40 bp, Homo sapiens
tttcaccctgttggccaggctggtctcgaactcctgacct

SEQ ID NO: 89875 - DNA, 40 bp, Homo sapiens
aggtcaggagttcgagaccagcctggccaacagggtgaaa

SEQ ID NO: 89876 - DNA, 40 bp, Homo sapiens
ttcaccctgttggccaggctggtctcgaactcctgacctc

SEQ ID NO: 89877 - DNA, 40 bp, Homo sapiens
gaggtcaggagttcgagaccagcctggccaacagggtgaa

SEQ ID NO: 89878 - DNA, 40 bp, Homo sapiens
tcaccctgttggccaggctggtctcgaactcctgacctca

SEQ ID NO: 89879 - DNA, 40 bp, Homo sapiens
tgaggtcaggagttcgagaccagcctggccaacagggtga

SEQ ID NO: 89880 - DNA, 40 bp, Homo sapiens
caccctgttggccaggctggtctcgaactcctgacctcaa

SEQ ID NO: 89881 - DNA, 40 bp, Homo sapiens
ttgaggtcaggagttcgagaccagcctggccaacagggtg

SEQ ID NO: 89882 - DNA, 40 bp, Homo sapiens
accctgttggccaggctggtctcgaactcctgacctcaag

SEQ ID NO: 89883 - DNA, 40 bp, Homo sapiens
cttgaggtcaggagttcgagaccagcctggccaacagggt

SEQ ID NO: 89884 - DNA, 40 bp, Homo sapiens
ccctgttggccaggctggtctcgaactcctgacctcaagt

SEQ ID NO: 89885 - DNA, 40 bp, Homo sapiens
acttgaggtcaggagttcgagaccagcctggccaacaggg

SEQ ID NO: 89886 - DNA, 40 bp, Homo sapiens
cctgttggccaggctggtctcgaactcctgacctcaagtg

SEQ ID NO: 89887 - DNA, 40 bp, Homo sapiens
cacttgaggtcaggagttcgagaccagcctggccaacagg

SEQ ID NO: 89888 - DNA, 40 bp, Homo sapiens
ctgttggccaggctggtctcgaactcctgacctcaagtga

SEQ ID NO: 89889 - DNA, 40 bp, Homo sapiens
tcacttgaggtcaggagttcgagaccagcctggccaacag

SEQ ID NO: 89890 - DNA, 40 bp, Homo sapiens
tgttggccaggctggtctcgaactcctgacctcaagtgat

SEQ ID NO: 89891 - DNA, 40 bp, Homo sapiens
atcacttgaggtcaggagttcgagaccagcctggccaaca

SEQ ID NO: 89892 - DNA, 40 bp, Homo sapiens
gttggccaggctggtctcgaactcctgacctcaagtgatt

SEQ ID NO: 89893 - DNA, 40 bp, Homo sapiens
aatcacttgaggtcaggagttcgagaccagcctggccaac

SEQ ID NO: 89894 - DNA, 40 bp, Homo sapiens
ttggccaggctggtctcgaactcctgacctcaagtgattc

SEQ ID NO: 89895 - DNA, 40 bp, Homo sapiens
gaatcacttgaggtcaggagttcgagaccagcctggccaa

SEQ ID NO: 89896 - DNA, 40 bp, Homo sapiens
tggccaggctggtctcgaactcctgacctcaagtgattca

SEQ ID NO: 89897 - DNA, 40 bp, Homo sapiens
tgaatcacttgaggtcaggagttcgagaccagcctggcca

SEQ ID NO: 89898 - DNA, 40 bp, Homo sapiens
ggccaggctggtctcgaactcctgacctcaagtgattcac

SEQ ID NO: 89899 - DNA, 40 bp, Homo sapiens
gtgaatcacttgaggtcaggagttcgagaccagcctggcc

SEQ ID NO: 89900 - DNA, 40 bp, Homo sapiens
gccaggctggtctcgaactcctgacctcaagtgattcacc

SEQ ID NO: 89901 - DNA, 40 bp, Homo sapiens
ggtgaatcacttgaggtcaggagttcgagaccagcctggc

SEQ ID NO: 89902 - DNA, 40 bp, Homo sapiens
ccaggctggtctcgaactcctgacctcaagtgattcaccc

SEQ ID NO: 89903 - DNA, 40 bp, Homo sapiens
gggtgaatcacttgaggtcaggagttcgagaccagcctgg

SEQ ID NO: 89904 - DNA, 40 bp, Homo sapiens
caggctggtctcgaactcctgacctcaagtgattcaccca

SEQ ID NO: 89905 - DNA, 40 bp, Homo sapiens
tgggtgaatcacttgaggtcaggagttcgagaccagcctg

SEQ ID NO: 89906 - DNA, 40 bp, Homo sapiens
aggctggtctcgaactcctgacctcaagtgattcacccac

SEQ ID NO: 89907 - DNA, 40 bp, Homo sapiens
gtgggtgaatcacttgaggtcaggagttcgagaccagcct

SEQ ID NO: 89908 - DNA, 40 bp, Homo sapiens
ggctggtctcgaactcctgacctcaagtgattcacccacc

SEQ ID NO: 89909 - DNA, 40 bp, Homo sapiens
ggtgggtgaatcacttgaggtcaggagttcgagaccagcc

SEQ ID NO: 89910 - DNA, 40 bp, Homo sapiens
gctggtctcgaactcctgacctcaagtgattcacccacct

SEQ ID NO: 89911 - DNA, 40 bp, Homo sapiens
aggtgggtgaatcacttgaggtcaggagttcgagaccagc

SEQ ID NO: 89912 - DNA, 40 bp, Homo sapiens
ctggtctcgaactcctgacctcaagtgattcacccacctt

SEQ ID NO: 89913 - DNA, 40 bp, Homo sapiens
aaggtgggtgaatcacttgaggtcaggagttcgagaccag

SEQ ID NO: 89914 - DNA, 40 bp, Homo sapiens
tggtctcgaactcctgacctcaagtgattcacccaccttg

SEQ ID NO: 89915 - DNA, 40 bp, Homo sapiens
caaggtgggtgaatcacttgaggtcaggagttcgagacca

SEQ ID NO: 89916 - DNA, 40 bp, Homo sapiens
ggtctcgaactcctgacctcaagtgattcacccaccttgg

SEQ ID NO: 89917 - DNA, 40 bp, Homo sapiens
ccaaggtgggtgaatcacttgaggtcaggagttcgagacc

SEQ ID NO: 89918 - DNA, 40 bp, Homo sapiens
gtctcgaactcctgacctcaagtgattcacccaccttggc

SEQ ID NO: 89919 - DNA, 40 bp, Homo sapiens
gccaaggtgggtgaatcacttgaggtcaggagttcgagac

SEQ ID NO: 89920 - DNA, 40 bp, Homo sapiens
tctcgaactcctgacctcaagtgattcacccaccttggcc

SEQ ID NO: 89921 - DNA, 40 bp, Homo sapiens
ggccaaggtgggtgaatcacttgaggtcaggagttcgaga

SEQ ID NO: 89922 - DNA, 40 bp, Homo sapiens
ctcgaactcctgacctcaagtgattcacccaccttggcct

SEQ ID NO: 89923 - DNA, 40 bp, Homo sapiens
aggccaaggtgggtgaatcacttgaggtcaggagttcgag

SEQ ID NO: 89924 - DNA, 40 bp, Homo sapiens
tcgaactcctgacctcaagtgattcacccaccttggcctc

SEQ ID NO: 89925 - DNA, 40 bp, Homo sapiens
gaggccaaggtgggtgaatcacttgaggtcaggagttcga

SEQ ID NO: 89926 - DNA, 40 bp, Homo sapiens
cgaactcctgacctcaagtgattcacccaccttggcctca

SEQ ID NO: 89927 - DNA, 40 bp, Homo sapiens
tgaggccaaggtgggtgaatcacttgaggtcaggagttcg

SEQ ID NO: 89928 - DNA, 40 bp, Homo sapiens
gaactcctgacctcaagtgattcacccaccttggcctcat

SEQ ID NO: 89929 - DNA, 40 bp, Homo sapiens
atgaggccaaggtgggtgaatcacttgaggtcaggagttc

SEQ ID NO: 89930 - DNA, 40 bp, Homo sapiens
aactcctgacctcaagtgattcacccaccttggcctcata

SEQ ID NO: 89931 - DNA, 40 bp, Homo sapiens
tatgaggccaaggtgggtgaatcacttgaggtcaggagtt

SEQ ID NO: 89932 - DNA, 40 bp, Homo sapiens
actcctgacctcaagtgattcacccaccttggcctcataa

SEQ ID NO: 89933 - DNA, 40 bp, Homo sapiens
ttatgaggccaaggtgggtgaatcacttgaggtcaggagt

SEQ ID NO: 89934 - DNA, 40 bp, Homo sapiens
ctcctgacctcaagtgattcacccaccttggcctcataaa

SEQ ID NO: 89935 - DNA, 40 bp, Homo sapiens
tttatgaggccaaggtgggtgaatcacttgaggtcaggag

SEQ ID NO: 89936 - DNA, 40 bp, Homo sapiens
tcctgacctcaagtgattcacccaccttggcctcataaac

SEQ ID NO: 89937 - DNA, 40 bp, Homo sapiens
gtttatgaggccaaggtgggtgaatcacttgaggtcagga

SEQ ID NO: 89938 - DNA, 40 bp, Homo sapiens
cctgacctcaagtgattcacccaccttggcctcataaacc

SEQ ID NO: 89939 - DNA, 40 bp, Homo sapiens
ggtttatgaggccaaggtgggtgaatcacttgaggtcagg

SEQ ID NO: 89940 - DNA, 40 bp, Homo sapiens
ctgacctcaagtgattcacccaccttggcctcataaacct

SEQ ID NO: 89941 - DNA, 40 bp, Homo sapiens
aggtttatgaggccaaggtgggtgaatcacttgaggtcag

SEQ ID NO: 89942 - DNA, 40 bp, Homo sapiens
tgacctcaagtgattcacccaccttggcctcataaacctg

SEQ ID NO: 89943 - DNA, 40 bp, Homo sapiens
caggtttatgaggccaaggtgggtgaatcacttgaggtca

SEQ ID NO: 89944 - DNA, 40 bp, Homo sapiens
gacctcaagtgattcacccaccttggcctcataaacctgt

SEQ ID NO: 89945 - DNA, 40 bp, Homo sapiens
acaggtttatgaggccaaggtgggtgaatcacttgaggtc

SEQ ID NO: 89946 - DNA, 40 bp, Homo sapiens
acctcaagtgattcacccaccttggcctcataaacctgtt

SEQ ID NO: 89947 - DNA, 40 bp, Homo sapiens
aacaggtttatgaggccaaggtgggtgaatcacttgaggt

SEQ ID NO: 89948 - DNA, 40 bp, Homo sapiens
cctcaagtgattcacccaccttggcctcataaacctgttt

SEQ ID NO: 89949 - DNA, 40 bp, Homo sapiens
aaacaggtttatgaggccaaggtgggtgaatcacttgagg

SEQ ID NO: 89950 - DNA, 40 bp, Homo sapiens
ctcaagtgattcacccaccttggcctcataaacctgtttt

SEQ ID NO: 89951 - DNA, 40 bp, Homo sapiens
aaaacaggtttatgaggccaaggtgggtgaatcacttgag

SEQ ID NO: 89952 - DNA, 40 bp, Homo sapiens
tcaagtgattcacccaccttggcctcataaacctgttttg

SEQ ID NO: 89953 - DNA, 40 bp, Homo sapiens
caaaacaggtttatgaggccaaggtgggtgaatcacttga

SEQ ID NO: 89954 - DNA, 40 bp, Homo sapiens
caagtgattcacccaccttggcctcataaacctgttttgc

SEQ ID NO: 89955 - DNA, 40 bp, Homo sapiens
gcaaaacaggtttatgaggccaaggtgggtgaatcacttg

SEQ ID NO: 89956 - DNA, 40 bp, Homo sapiens
aagtgattcacccaccttggcctcataaacctgttttgca

SEQ ID NO: 89957 - DNA, 40 bp, Homo sapiens
tgcaaaacaggtttatgaggccaaggtgggtgaatcactt

SEQ ID NO: 89958 - DNA, 40 bp, Homo sapiens
agtgattcacccaccttggcctcataaacctgttttgcag

SEQ ID NO: 89959 - DNA, 40 bp, Homo sapiens
ctgcaaaacaggtttatgaggccaaggtgggtgaatcact

SEQ ID NO: 89960 - DNA, 40 bp, Homo sapiens
gtgattcacccaccttggcctcataaacctgttttgcaga

SEQ ID NO: 89961 - DNA, 40 bp, Homo sapiens
tctgcaaaacaggtttatgaggccaaggtgggtgaatcac

SEQ ID NO: 89962 - DNA, 40 bp, Homo sapiens
tgattcacccaccttggcctcataaacctgttttgcagaa

SEQ ID NO: 89963 - DNA, 40 bp, Homo sapiens
ttctgcaaaacaggtttatgaggccaaggtgggtgaatca

SEQ ID NO: 89964 - DNA, 40 bp, Homo sapiens
gattcacccaccttggcctcataaacctgttttgcagaac

SEQ ID NO: 89965 - DNA, 40 bp, Homo sapiens
gttctgcaaaacaggtttatgaggccaaggtgggtgaatc

SEQ ID NO: 89966 - DNA, 40 bp, Homo sapiens
attcacccaccttggcctcataaacctgttttgcagaact

SEQ ID NO: 89967 - DNA, 40 bp, Homo sapiens
agttctgcaaaacaggtttatgaggccaaggtgggtgaat

SEQ ID NO: 89968 - DNA, 40 bp, Homo sapiens
ttcacccaccttggcctcataaacctgttttgcagaactc

SEQ ID NO: 89969 - DNA, 40 bp, Homo sapiens
gagttctgcaaaacaggtttatgaggccaaggtgggtgaa

SEQ ID NO: 89970 - DNA, 40 bp, Homo sapiens
tcacccaccttggcctcataaacctgttttgcagaactca

SEQ ID NO: 89971 - DNA, 40 bp, Homo sapiens
tgagttctgcaaaacaggtttatgaggccaaggtgggtga

SEQ ID NO: 89972 - DNA, 40 bp, Homo sapiens
cacccaccttggcctcataaacctgttttgcagaactcat

SEQ ID NO: 89973 - DNA, 40 bp, Homo sapiens
atgagttctgcaaaacaggtttatgaggccaaggtgggtg

SEQ ID NO: 89974 - DNA, 40 bp, Homo sapiens
acccaccttggcctcataaacctgttttgcagaactcatt

SEQ ID NO: 89975 - DNA, 40 bp, Homo sapiens
aatgagttctgcaaaacaggtttatgaggccaaggtgggt

SEQ ID NO: 89976 - DNA, 40 bp, Homo sapiens
cccaccttggcctcataaacctgttttgcagaactcattt

SEQ ID NO: 89977 - DNA, 40 bp, Homo sapiens
aaatgagttctgcaaaacaggtttatgaggccaaggtggg

SEQ ID NO: 89978 - DNA, 40 bp, Homo sapiens
ccaccttggcctcataaacctgttttgcagaactcattta

SEQ ID NO: 89979 - DNA, 40 bp, Homo sapiens
taaatgagttctgcaaaacaggtttatgaggccaaggtgg

SEQ ID NO: 89980 - DNA, 40 bp, Homo sapiens
caccttggcctcataaacctgttttgcagaactcatttat

SEQ ID NO: 89981 - DNA, 40 bp, Homo sapiens
ataaatgagttctgcaaaacaggtttatgaggccaaggtg

SEQ ID NO: 89982 - DNA, 40 bp, Homo sapiens
accttggcctcataaacctgttttgcagaactcatttatt

SEQ ID NO: 89983 - DNA, 40 bp, Homo sapiens
aataaatgagttctgcaaaacaggtttatgaggccaaggt

SEQ ID NO: 89984 - DNA, 40 bp, Homo sapiens
ccttggcctcataaacctgttttgcagaactcatttattc

SEQ ID NO: 89985 - DNA, 40 bp, Homo sapiens
gaataaatgagttctgcaaaacaggtttatgaggccaagg

SEQ ID NO: 89986 - DNA, 40 bp, Homo sapiens
cttggcctcataaacctgttttgcagaactcatttattca

SEQ ID NO: 89987 - DNA, 40 bp, Homo sapiens
tgaataaatgagttctgcaaaacaggtttatgaggccaag

SEQ ID NO: 89988 - DNA, 40 bp, Homo sapiens
ttggcctcataaacctgttttgcagaactcatttattcag

SEQ ID NO: 89989 - DNA, 40 bp, Homo sapiens
ctgaataaatgagttctgcaaaacaggtttatgaggccaa

SEQ ID NO: 89990 - DNA, 40 bp, Homo sapiens
tggcctcataaacctgttttgcagaactcatttattcagc

SEQ ID NO: 89991 - DNA, 40 bp, Homo sapiens
gctgaataaatgagttctgcaaaacaggtttatgaggcca

SEQ ID NO: 89992 - DNA, 40 bp, Homo sapiens
ggcctcataaacctgttttgcagaactcatttattcagca

SEQ ID NO: 89993 - DNA, 40 bp, Homo sapiens
tgctgaataaatgagttctgcaaaacaggtttatgaggcc

SEQ ID NO: 89994 - DNA, 40 bp, Homo sapiens
gcctcataaacctgttttgcagaactcatttattcagcaa

SEQ ID NO: 89995 - DNA, 40 bp, Homo sapiens
ttgctgaataaatgagttctgcaaaacaggtttatgaggc

SEQ ID NO: 89996 - DNA, 40 bp, Homo sapiens
cctcataaacctgttttgcagaactcatttattcagcaaa

SEQ ID NO: 89997 - DNA, 40 bp, Homo sapiens
tttgctgaataaatgagttctgcaaaacaggtttatgagg

SEQ ID NO: 89998 - DNA, 40 bp, Homo sapiens
ctcataaacctgttttgcagaactcatttattcagcaaat

SEQ ID NO: 89999 - DNA, 40 bp, Homo sapiens
atttgctgaataaatgagttctgcaaaacaggtttatgag

SEQ ID NO: 90000 - DNA, 40 bp, Homo sapiens
tcataaacctgttttgcagaactcatttattcagcaaata

SEQ ID NO: 90001 - DNA, 40 bp, Homo sapiens
tatttgctgaataaatgagttctgcaaaacaggtttatga

SEQ ID NO: 90002 - DNA, 40 bp, Homo sapiens
cataaacctgttttgcagaactcatttattcagcaaatat

SEQ ID NO: 90003 - DNA, 40 bp, Homo sapiens
atatttgctgaataaatgagttctgcaaaacaggtttatg

SEQ ID NO: 90004 - DNA, 40 bp, Homo sapiens
ataaacctgttttgcagaactcatttattcagcaaatatt

SEQ ID NO: 90005 - DNA, 40 bp, Homo sapiens
aatatttgctgaataaatgagttctgcaaaacaggtttat

SEQ ID NO: 90006 - DNA, 40 bp, Homo sapiens
taaacctgttttgcagaactcatttattcagcaaatattt

SEQ ID NO: 90007 - DNA, 40 bp, Homo sapiens
aaatatttgctgaataaatgagttctgcaaaacaggttta

SEQ ID NO: 90008 - DNA, 40 bp, Homo sapiens
aaacctgttttgcagaactcatttattcagcaaatattta

SEQ ID NO: 90009 - DNA, 40 bp, Homo sapiens
taaatatttgctgaataaatgagttctgcaaaacaggttt

SEQ ID NO: 90010 - DNA, 40 bp, Homo sapiens
aacctgttttgcagaactcatttattcagcaaatatttat

SEQ ID NO: 90011 - DNA, 40 bp, Homo sapiens
ataaatatttgctgaataaatgagttctgcaaaacaggtt

SEQ ID NO: 90012 - DNA, 40 bp, Homo sapiens
acctgttttgcagaactcatttattcagcaaatatttatt

SEQ ID NO: 90013 - DNA, 40 bp, Homo sapiens
aataaatatttgctgaataaatgagttctgcaaaacaggt

SEQ ID NO: 90014 - DNA, 40 bp, Homo sapiens
cctgttttgcagaactcatttattcagcaaatatttattg

SEQ ID NO: 90015 - DNA, 40 bp, Homo sapiens
caataaatatttgctgaataaatgagttctgcaaaacagg

SEQ ID NO: 90016 - DNA, 40 bp, Homo sapiens
ctgttttgcagaactcatttattcagcaaatatttattga

SEQ ID NO: 90017 - DNA, 40 bp, Homo sapiens
tcaataaatatttgctgaataaatgagttctgcaaaacag

SEQ ID NO: 90018 - DNA, 40 bp, Homo sapiens
tgttttgcagaactcatttattcagcaaatatttattgag

SEQ ID NO: 90019 - DNA, 40 bp, Homo sapiens
ctcaataaatatttgctgaataaatgagttctgcaaaaca

SEQ ID NO: 90020 - DNA, 40 bp, Homo sapiens
gttttgcagaactcatttattcagcaaatatttattgagt

SEQ ID NO: 90021 - DNA, 40 bp, Homo sapiens
actcaataaatatttgctgaataaatgagttctgcaaaac

SEQ ID NO: 90022 - DNA, 40 bp, Homo sapiens
ttttgcagaactcatttattcagcaaatatttattgagtg

SEQ ID NO: 90023 - DNA, 40 bp, Homo sapiens
cactcaataaatatttgctgaataaatgagttctgcaaaa

SEQ ID NO: 90024 - DNA, 40 bp, Homo sapiens
tttgcagaactcatttattcagcaaatatttattgagtgc

SEQ ID NO: 90025 - DNA, 40 bp, Homo sapiens
gcactcaataaatatttgctgaataaatgagttctgcaaa

SEQ ID NO: 90026 - DNA, 40 bp, Homo sapiens
ttgcagaactcatttattcagcaaatatttattgagtgcc

SEQ ID NO: 90027 - DNA, 40 bp, Homo sapiens
ggcactcaataaatatttgctgaataaatgagttctgcaa

SEQ ID NO: 90028 - DNA, 40 bp, Homo sapiens
tgcagaactcatttattcagcaaatatttattgagtgcct

SEQ ID NO: 90029 - DNA, 40 bp, Homo sapiens
aggcactcaataaatatttgctgaataaatgagttctgca

SEQ ID NO: 90030 - DNA, 40 bp, Homo sapiens
gcagaactcatttattcagcaaatatttattgagtgccta

SEQ ID NO: 90031 - DNA, 40 bp, Homo sapiens
taggcactcaataaatatttgctgaataaatgagttctgc

SEQ ID NO: 90032 - DNA, 40 bp, Homo sapiens
cagaactcatttattcagcaaatatttattgagtgcctac

SEQ ID NO: 90033 - DNA, 40 bp, Homo sapiens
gtaggcactcaataaatatttgctgaataaatgagttctg

SEQ ID NO: 90034 - DNA, 40 bp, Homo sapiens
agaactcatttattcagcaaatatttattgagtgcctacc

SEQ ID NO: 90035 - DNA, 40 bp, Homo sapiens
ggtaggcactcaataaatatttgctgaataaatgagttct

SEQ ID NO: 90036 - DNA, 40 bp, Homo sapiens
gaactcatttattcagcaaatatttattgagtgcctacca

SEQ ID NO: 90037 - DNA, 40 bp, Homo sapiens
tggtaggcactcaataaatatttgctgaataaatgagttc

SEQ ID NO: 90038 - DNA, 40 bp, Homo sapiens
aactcatttattcagcaaatatttattgagtgcctaccag

SEQ ID NO: 90039 - DNA, 40 bp, Homo sapiens
ctggtaggcactcaataaatatttgctgaataaatgagtt

SEQ ID NO: 90040 - DNA, 40 bp, Homo sapiens
actcatttattcagcaaatatttattgagtgcctaccaga

SEQ ID NO: 90041 - DNA, 40 bp, Homo sapiens
tctggtaggcactcaataaatatttgctgaataaatgagt

SEQ ID NO: 90042 - DNA, 40 bp, Homo sapiens
ctcatttattcagcaaatatttattgagtgcctaccagat

SEQ ID NO: 90043 - DNA, 40 bp, Homo sapiens
atctggtaggcactcaataaatatttgctgaataaatgag

SEQ ID NO: 90044 - DNA, 40 bp, Homo sapiens
tcatttattcagcaaatatttattgagtgcctaccagatg

SEQ ID NO: 90045 - DNA, 40 bp, Homo sapiens
catctggtaggcactcaataaatatttgctgaataaatga

SEQ ID NO: 90046 - DNA, 40 bp, Homo sapiens
catttattcagcaaatatttattgagtgcctaccagatgc

SEQ ID NO: 90047 - DNA, 40 bp, Homo sapiens
gcatctggtaggcactcaataaatatttgctgaataaatg

SEQ ID NO: 90048 - DNA, 40 bp, Homo sapiens
atttattcagcaaatatttattgagtgcctaccagatgcc

SEQ ID NO: 90049 - DNA, 40 bp, Homo sapiens
ggcatctggtaggcactcaataaatatttgctgaataaat

SEQ ID NO: 90050 - DNA, 40 bp, Homo sapiens
tttattcagcaaatatttattgagtgcctaccagatgcca

SEQ ID NO: 90051 - DNA, 40 bp, Homo sapiens
tggcatctggtaggcactcaataaatatttgctgaataaa

SEQ ID NO: 90052 - DNA, 40 bp, Homo sapiens
ttattcagcaaatatttattgagtgcctaccagatgccag

SEQ ID NO: 90053 - DNA, 40 bp, Homo sapiens
ctggcatctggtaggcactcaataaatatttgctgaataa

SEQ ID NO: 90054 - DNA, 40 bp, Homo sapiens
tattcagcaaatatttattgagtgcctaccagatgccagt

SEQ ID NO: 90055 - DNA, 40 bp, Homo sapiens
actggcatctggtaggcactcaataaatatttgctgaata

SEQ ID NO: 90056 - DNA, 40 bp, Homo sapiens
attcagcaaatatttattgagtgcctaccagatgccagtc

SEQ ID NO: 90057 - DNA, 40 bp, Homo sapiens
gactggcatctggtaggcactcaataaatatttgctgaat

SEQ ID NO: 90058 - DNA, 40 bp, Homo sapiens
ttcagcaaatatttattgagtgcctaccagatgccagtca

SEQ ID NO: 90059 - DNA, 40 bp, Homo sapiens
tgactggcatctggtaggcactcaataaatatttgctgaa

SEQ ID NO: 90060 - DNA, 40 bp, Homo sapiens
tcagcaaatatttattgagtgcctaccagatgccagtcac

SEQ ID NO: 90061 - DNA, 40 bp, Homo sapiens
gtgactggcatctggtaggcactcaataaatatttgctga

SEQ ID NO: 90062 - DNA, 40 bp, Homo sapiens
cagcaaatatttattgagtgcctaccagatgccagtcacc

SEQ ID NO: 90063 - DNA, 40 bp, Homo sapiens
ggtgactggcatctggtaggcactcaataaatatttgctg

SEQ ID NO: 90064 - DNA, 40 bp, Homo sapiens
agcaaatatttattgagtgcctaccagatgccagtcacca

SEQ ID NO: 90065 - DNA, 40 bp, Homo sapiens
tggtgactggcatctggtaggcactcaataaatatttgct

SEQ ID NO: 90066 - DNA, 40 bp, Homo sapiens
gcaaatatttattgagtgcctaccagatgccagtcaccac

SEQ ID NO: 90067 - DNA, 40 bp, Homo sapiens
gtggtgactggcatctggtaggcactcaataaatatttgc

SEQ ID NO: 90068 - DNA, 40 bp, Homo sapiens
caaatatttattgagtgcctaccagatgccagtcaccaca

SEQ ID NO: 90069 - DNA, 40 bp, Homo sapiens
tgtggtgactggcatctggtaggcactcaataaatatttg

SEQ ID NO: 90070 - DNA, 40 bp, Homo sapiens
aaatatttattgagtgcctaccagatgccagtcaccacac

SEQ ID NO: 90071 - DNA, 40 bp, Homo sapiens
gtgtggtgactggcatctggtaggcactcaataaatattt

SEQ ID NO: 90072 - DNA, 40 bp, Homo sapiens
aatatttattgagtgcctaccagatgccagtcaccacaca

SEQ ID NO: 90073 - DNA, 40 bp, Homo sapiens
tgtgtggtgactggcatctggtaggcactcaataaatatt

SEQ ID NO: 90074 - DNA, 40 bp, Homo sapiens
atatttattgagtgcctaccagatgccagtcaccacacaa

SEQ ID NO: 90075 - DNA, 40 bp, Homo sapiens
ttgtgtggtgactggcatctggtaggcactcaataaatat

SEQ ID NO: 90076 - DNA, 40 bp, Homo sapiens
tatttattgagtgcctaccagatgccagtcaccacacaag

SEQ ID NO: 90077 - DNA, 40 bp, Homo sapiens
cttgtgtggtgactggcatctggtaggcactcaataaata

SEQ ID NO: 90078 - DNA, 40 bp, Homo sapiens
atttattgagtgcctaccagatgccagtcaccacacaagg

SEQ ID NO: 90079 - DNA, 40 bp, Homo sapiens
ccttgtgtggtgactggcatctggtaggcactcaataaat

SEQ ID NO: 90080 - DNA, 40 bp, Homo sapiens
tttattgagtgcctaccagatgccagtcaccacacaaggc

SEQ ID NO: 90081 - DNA, 40 bp, Homo sapiens
gccttgtgtggtgactggcatctggtaggcactcaataaa

SEQ ID NO: 90082 - DNA, 40 bp, Homo sapiens
ttattgagtgcctaccagatgccagtcaccacacaaggca

SEQ ID NO: 90083 - DNA, 40 bp, Homo sapiens
tgccttgtgtggtgactggcatctggtaggcactcaataa

SEQ ID NO: 90084 - DNA, 40 bp, Homo sapiens
tattgagtgcctaccagatgccagtcaccacacaaggcac

SEQ ID NO: 90085 - DNA, 40 bp, Homo sapiens
gtgccttgtgtggtgactggcatctggtaggcactcaata

SEQ ID NO: 90086 - DNA, 40 bp, Homo sapiens
attgagtgcctaccagatgccagtcaccacacaaggcact

SEQ ID NO: 90087 - DNA, 40 bp, Homo sapiens
agtgccttgtgtggtgactggcatctggtaggcactcaat

SEQ ID NO: 90088 - DNA, 40 bp, Homo sapiens
ttgagtgcctaccagatgccagtcaccacacaaggcactg

SEQ ID NO: 90089 - DNA, 40 bp, Homo sapiens
cagtgccttgtgtggtgactggcatctggtaggcactcaa

SEQ ID NO: 90090 - DNA, 40 bp, Homo sapiens
tgagtgcctaccagatgccagtcaccacacaaggcactgg

SEQ ID NO: 90091 - DNA, 40 bp, Homo sapiens
ccagtgccttgtgtggtgactggcatctggtaggcactca

SEQ ID NO: 90092 - DNA, 40 bp, Homo sapiens
gagtgcctaccagatgccagtcaccacacaaggcactggg

SEQ ID NO: 90093 - DNA, 40 bp, Homo sapiens
cccagtgccttgtgtggtgactggcatctggtaggcactc

SEQ ID NO: 90094 - DNA, 40 bp, Homo sapiens
agtgcctaccagatgccagtcaccacacaaggcactgggt

SEQ ID NO: 90095 - DNA, 40 bp, Homo sapiens
acccagtgccttgtgtggtgactggcatctggtaggcact

SEQ ID NO: 90096 - DNA, 40 bp, Homo sapiens
gtgcctaccagatgccagtcaccacacaaggcactgggta

SEQ ID NO: 90097 - DNA, 40 bp, Homo sapiens
tacccagtgccttgtgtggtgactggcatctggtaggcac

SEQ ID NO: 90098 - DNA, 40 bp, Homo sapiens
tgcctaccagatgccagtcaccacacaaggcactgggtat

SEQ ID NO: 90099 - DNA, 40 bp, Homo sapiens
atacccagtgccttgtgtggtgactggcatctggtaggca

SEQ ID NO: 90100 - DNA, 40 bp, Homo sapiens
gcctaccagatgccagtcaccacacaaggcactgggtata

SEQ ID NO: 90101 - DNA, 40 bp, Homo sapiens
tatacccagtgccttgtgtggtgactggcatctggtaggc

SEQ ID NO: 90102 - DNA, 40 bp, Homo sapiens
cctaccagatgccagtcaccacacaaggcactgggtatat

SEQ ID NO: 90103 - DNA, 40 bp, Homo sapiens
atatacccagtgccttgtgtggtgactggcatctggtagg

SEQ ID NO: 90104 - DNA, 40 bp, Homo sapiens
ctaccagatgccagtcaccacacaaggcactgggtatatg

SEQ ID NO: 90105 - DNA, 40 bp, Homo sapiens
catatacccagtgccttgtgtggtgactggcatctggtag

SEQ ID NO: 90106 - DNA, 40 bp, Homo sapiens
taccagatgccagtcaccacacaaggcactgggtatatgg

SEQ ID NO: 90107 - DNA, 40 bp, Homo sapiens
ccatatacccagtgccttgtgtggtgactggcatctggta

SEQ ID NO: 90108 - DNA, 40 bp, Homo sapiens
accagatgccagtcaccacacaaggcactgggtatatggt

SEQ ID NO: 90109 - DNA, 40 bp, Homo sapiens
accatatacccagtgccttgtgtggtgactggcatctggt

SEQ ID NO: 90110 - DNA, 40 bp, Homo sapiens
ccagatgccagtcaccacacaaggcactgggtatatggta

SEQ ID NO: 90111 - DNA, 40 bp, Homo sapiens
taccatatacccagtgccttgtgtggtgactggcatctgg

SEQ ID NO: 90112 - DNA, 40 bp, Homo sapiens
cagatgccagtcaccacacaaggcactgggtatatggtat

SEQ ID NO: 90113 - DNA, 40 bp, Homo sapiens
ataccatatacccagtgccttgtgtggtgactggcatctg

SEQ ID NO: 90114 - DNA, 40 bp, Homo sapiens
agatgccagtcaccacacaaggcactgggtatatggtatc

SEQ ID NO: 90115 - DNA, 40 bp, Homo sapiens
gataccatatacccagtgccttgtgtggtgactggcatct

SEQ ID NO: 90116 - DNA, 40 bp, Homo sapiens
gatgccagtcaccacacaaggcactgggtatatggtatcc

SEQ ID NO: 90117 - DNA, 40 bp, Homo sapiens
ggataccatatacccagtgccttgtgtggtgactggcatc

SEQ ID NO: 90118 - DNA, 40 bp, Homo sapiens
atgccagtcaccacacaaggcactgggtatatggtatccc

SEQ ID NO: 90119 - DNA, 40 bp, Homo sapiens
gggataccatatacccagtgccttgtgtggtgactggcat

SEQ ID NO: 90120 - DNA, 40 bp, Homo sapiens
tgccagtcaccacacaaggcactgggtatatggtatcccc

SEQ ID NO: 90121 - DNA, 40 bp, Homo sapiens
ggggataccatatacccagtgccttgtgtggtgactggca

SEQ ID NO: 90122 - DNA, 40 bp, Homo sapiens
gccagtcaccacacaaggcactgggtatatggtatcccca

SEQ ID NO: 90123 - DNA, 40 bp, Homo sapiens
tggggataccatatacccagtgccttgtgtggtgactggc

SEQ ID NO: 90124 - DNA, 40 bp, Homo sapiens
ccagtcaccacacaaggcactgggtatatggtatccccaa

SEQ ID NO: 90125 - DNA, 40 bp, Homo sapiens
ttggggataccatatacccagtgccttgtgtggtgactgg

SEQ ID NO: 90126 - DNA, 40 bp, Homo sapiens
cagtcaccacacaaggcactgggtatatggtatccccaaa

SEQ ID NO: 90127 - DNA, 40 bp, Homo sapiens
tttggggataccatatacccagtgccttgtgtggtgactg

SEQ ID NO: 90128 - DNA, 40 bp, Homo sapiens
agtcaccacacaaggcactgggtatatggtatccccaaac

SEQ ID NO: 90129 - DNA, 40 bp, Homo sapiens
gtttggggataccatatacccagtgccttgtgtggtgact

SEQ ID NO: 90130 - DNA, 40 bp, Homo sapiens
gtcaccacacaaggcactgggtatatggtatccccaaaca

SEQ ID NO: 90131 - DNA, 40 bp, Homo sapiens
tgtttggggataccatatacccagtgccttgtgtggtgac

SEQ ID NO: 90132 - DNA, 40 bp, Homo sapiens
tcaccacacaaggcactgggtatatggtatccccaaacaa

SEQ ID NO: 90133 - DNA, 40 bp, Homo sapiens
ttgtttggggataccatatacccagtgccttgtgtggtga

SEQ ID NO: 90134 - DNA, 40 bp, Homo sapiens
caccacacaaggcactgggtatatggtatccccaaacaag

SEQ ID NO: 90135 - DNA, 40 bp, Homo sapiens
cttgtttggggataccatatacccagtgccttgtgtggtg

SEQ ID NO: 90136 - DNA, 40 bp, Homo sapiens
accacacaaggcactgggtatatggtatccccaaacaaga

SEQ ID NO: 90137 - DNA, 40 bp, Homo sapiens
tcttgtttggggataccatatacccagtgccttgtgtggt

SEQ ID NO: 90138 - DNA, 40 bp, Homo sapiens
ccacacaaggcactgggtatatggtatccccaaacaagag

SEQ ID NO: 90139 - DNA, 40 bp, Homo sapiens
ctcttgtttggggataccatatacccagtgccttgtgtgg

SEQ ID NO: 90140 - DNA, 40 bp, Homo sapiens
cacacaaggcactgggtatatggtatccccaaacaagaga

SEQ ID NO: 90141 - DNA, 40 bp, Homo sapiens
tctcttgtttggggataccatatacccagtgccttgtgtg

SEQ ID NO: 90142 - DNA, 40 bp, Homo sapiens
acacaaggcactgggtatatggtatccccaaacaagagac

SEQ ID NO: 90143 - DNA, 40 bp, Homo sapiens
gtctcttgtttggggataccatatacccagtgccttgtgt

SEQ ID NO: 90144 - DNA, 40 bp, Homo sapiens
cacaaggcactgggtatatggtatccccaaacaagagaca

SEQ ID NO: 90145 - DNA, 40 bp, Homo sapiens
tgtctcttgtttggggataccatatacccagtgccttgtg

SEQ ID NO: 90146 - DNA, 40 bp, Homo sapiens
acaaggcactgggtatatggtatccccaaacaagagacat

SEQ ID NO: 90147 - DNA, 40 bp, Homo sapiens
atgtctcttgtttggggataccatatacccagtgccttgt

SEQ ID NO: 90148 - DNA, 40 bp, Homo sapiens
caaggcactgggtatatggtatccccaaacaagagacata

SEQ ID NO: 90149 - DNA, 40 bp, Homo sapiens
tatgtctcttgtttggggataccatatacccagtgccttg

SEQ ID NO: 90150 - DNA, 40 bp, Homo sapiens
aaggcactgggtatatggtatccccaaacaagagacataa

SEQ ID NO: 90151 - DNA, 40 bp, Homo sapiens
ttatgtctcttgtttggggataccatatacccagtgcctt

SEQ ID NO: 90152 - DNA, 40 bp, Homo sapiens
aggcactgggtatatggtatccccaaacaagagacataat

SEQ ID NO: 90153 - DNA, 40 bp, Homo sapiens
attatgtctcttgtttggggataccatatacccagtgcct

SEQ ID NO: 90154 - DNA, 40 bp, Homo sapiens
ggcactgggtatatggtatccccaaacaagagacataatc

SEQ ID NO: 90155 - DNA, 40 bp, Homo sapiens
gattatgtctcttgtttggggataccatatacccagtgcc

SEQ ID NO: 90156 - DNA, 40 bp, Homo sapiens
gcactgggtatatggtatccccaaacaagagacataatcc

SEQ ID NO: 90157 - DNA, 40 bp, Homo sapiens
ggattatgtctcttgtttggggataccatatacccagtgc

SEQ ID NO: 90158 - DNA, 40 bp, Homo sapiens
cactgggtatatggtatccccaaacaagagacataatccc

SEQ ID NO: 90159 - DNA, 40 bp, Homo sapiens
gggattatgtctcttgtttggggataccatatacccagtg

SEQ ID NO: 90160 - DNA, 40 bp, Homo sapiens
actgggtatatggtatccccaaacaagagacataatcccg

SEQ ID NO: 90161 - DNA, 40 bp, Homo sapiens
cgggattatgtctcttgtttggggataccatatacccagt

SEQ ID NO: 90162 - DNA, 40 bp, Homo sapiens
ctgggtatatggtatccccaaacaagagacataatcccgg

SEQ ID NO: 90163 - DNA, 40 bp, Homo sapiens
ccgggattatgtctcttgtttggggataccatatacccag

SEQ ID NO: 90164 - DNA, 40 bp, Homo sapiens
tgggtatatggtatccccaaacaagagacataatcccggt

SEQ ID NO: 90165 - DNA, 40 bp, Homo sapiens
accgggattatgtctcttgtttggggataccatataccca

SEQ ID NO: 90166 - DNA, 40 bp, Homo sapiens
gggtatatggtatccccaaacaagagacataatcccggtc

SEQ ID NO: 90167 - DNA, 40 bp, Homo sapiens
gaccgggattatgtctcttgtttggggataccatataccc

SEQ ID NO: 90168 - DNA, 40 bp, Homo sapiens
ggtatatggtatccccaaacaagagacataatcccggtcc

SEQ ID NO: 90169 - DNA, 40 bp, Homo sapiens
ggaccgggattatgtctcttgtttggggataccatatacc

SEQ ID NO: 90170 - DNA, 40 bp, Homo sapiens
gtatatggtatccccaaacaagagacataatcccggtcct

SEQ ID NO: 90171 - DNA, 40 bp, Homo sapiens
aggaccgggattatgtctcttgtttggggataccatatac

SEQ ID NO: 90172 - DNA, 40 bp, Homo sapiens
tatatggtatccccaaacaagagacataatcccggtcctt

SEQ ID NO: 90173 - DNA, 40 bp, Homo sapiens
aaggaccgggattatgtctcttgtttggggataccatata

SEQ ID NO: 90174 - DNA, 40 bp, Homo sapiens
atatggtatccccaaacaagagacataatcccggtcctta

SEQ ID NO: 90175 - DNA, 40 bp, Homo sapiens
taaggaccgggattatgtctcttgtttggggataccatat

SEQ ID NO: 90176 - DNA, 40 bp, Homo sapiens
tatggtatccccaaacaagagacataatcccggtccttag

SEQ ID NO: 90177 - DNA, 40 bp, Homo sapiens
ctaaggaccgggattatgtctcttgtttggggataccata

SEQ ID NO: 90178 - DNA, 40 bp, Homo sapiens
atggtatccccaaacaagagacataatcccggtccttagg

SEQ ID NO: 90179 - DNA, 40 bp, Homo sapiens
cctaaggaccgggattatgtctcttgtttggggataccat

SEQ ID NO: 90180 - DNA, 40 bp, Homo sapiens
tggtatccccaaacaagagacataatcccggtccttaggt

SEQ ID NO: 90181 - DNA, 40 bp, Homo sapiens
acctaaggaccgggattatgtctcttgtttggggatacca

SEQ ID NO: 90182 - DNA, 40 bp, Homo sapiens
ggtatccccaaacaagagacataatcccggtccttaggta

SEQ ID NO: 90183 - DNA, 40 bp, Homo sapiens
tacctaaggaccgggattatgtctcttgtttggggatacc

SEQ ID NO: 90184 - DNA, 40 bp, Homo sapiens
gtatccccaaacaagagacataatcccggtccttaggtag

SEQ ID NO: 90185 - DNA, 40 bp, Homo sapiens
ctacctaaggaccgggattatgtctcttgtttggggatac

SEQ ID NO: 90186 - DNA, 40 bp, Homo sapiens
tatccccaaacaagagacataatcccggtccttaggtagt

SEQ ID NO: 90187 - DNA, 40 bp, Homo sapiens
actacctaaggaccgggattatgtctcttgtttggggata

SEQ ID NO: 90188 - DNA, 40 bp, Homo sapiens
atccccaaacaagagacataatcccggtccttaggtagtg

SEQ ID NO: 90189 - DNA, 40 bp, Homo sapiens
cactacctaaggaccgggattatgtctcttgtttggggat

SEQ ID NO: 90190 - DNA, 40 bp, Homo sapiens
tccccaaacaagagacataatcccggtccttaggtagtgc

SEQ ID NO: 90191 - DNA, 40 bp, Homo sapiens
gcactacctaaggaccgggattatgtctcttgtttgggga

SEQ ID NO: 90192 - DNA, 40 bp, Homo sapiens
ccccaaacaagagacataatcccggtccttaggtagtgct

SEQ ID NO: 90193 - DNA, 40 bp, Homo sapiens
agcactacctaaggaccgggattatgtctcttgtttgggg

SEQ ID NO: 90194 - DNA, 40 bp, Homo sapiens
cccaaacaagagacataatcccggtccttaggtagtgcta

SEQ ID NO: 90195 - DNA, 40 bp, Homo sapiens
tagcactacctaaggaccgggattatgtctcttgtttggg

SEQ ID NO: 90196 - DNA, 40 bp, Homo sapiens
ccaaacaagagacataatcccggtccttaggtagtgctag

SEQ ID NO: 90197 - DNA, 40 bp, Homo sapiens
ctagcactacctaaggaccgggattatgtctcttgtttgg

SEQ ID NO: 90198 - DNA, 40 bp, Homo sapiens
caaacaagagacataatcccggtccttaggtagtgctagt

SEQ ID NO: 90199 - DNA, 40 bp, Homo sapiens
actagcactacctaaggaccgggattatgtctcttgtttg

SEQ ID NO: 90200 - DNA, 40 bp, Homo sapiens
aaacaagagacataatcccggtccttaggtagtgctagtg

SEQ ID NO: 90201 - DNA, 40 bp, Homo sapiens
cactagcactacctaaggaccgggattatgtctcttgttt

SEQ ID NO: 90202 - DNA, 40 bp, Homo sapiens
aacaagagacataatcccggtccttaggtagtgctagtgt

SEQ ID NO: 90203 - DNA, 40 bp, Homo sapiens
acactagcactacctaaggaccgggattatgtctcttgtt

SEQ ID NO: 90204 - DNA, 40 bp, Homo sapiens
acaagagacataatcccggtccttaggtagtgctagtgtg

SEQ ID NO: 90205 - DNA, 40 bp, Homo sapiens
cacactagcactacctaaggaccgggattatgtctcttgt

SEQ ID NO: 90206 - DNA, 40 bp, Homo sapiens
caagagacataatcccggtccttaggtagtgctagtgtgg

SEQ ID NO: 90207 - DNA, 40 bp, Homo sapiens
ccacactagcactacctaaggaccgggattatgtctcttg

SEQ ID NO: 90208 - DNA, 40 bp, Homo sapiens
aagagacataatcccggtccttaggtagtgctagtgtggt

SEQ ID NO: 90209 - DNA, 40 bp, Homo sapiens
accacactagcactacctaaggaccgggattatgtctctt

SEQ ID NO: 90210 - DNA, 40 bp, Homo sapiens
agagacataatcccggtccttaggtagtgctagtgtggtc

SEQ ID NO: 90211 - DNA, 40 bp, Homo sapiens
gaccacactagcactacctaaggaccgggattatgtctct

SEQ ID NO: 90212 - DNA, 40 bp, Homo sapiens
gagacataatcccggtccttaggtagtgctagtgtggtct

SEQ ID NO: 90213 - DNA, 40 bp, Homo sapiens
agaccacactagcactacctaaggaccgggattatgtctc

SEQ ID NO: 90214 - DNA, 40 bp, Homo sapiens
agacataatcccggtccttaggtagtgctagtgtggtctg

SEQ ID NO: 90215 - DNA, 40 bp, Homo sapiens
cagaccacactagcactacctaaggaccgggattatgtct

SEQ ID NO: 90216 - DNA, 40 bp, Homo sapiens
gacataatcccggtccttaggtagtgctagtgtggtctgt

SEQ ID NO: 90217 - DNA, 40 bp, Homo sapiens
acagaccacactagcactacctaaggaccgggattatgtc

SEQ ID NO: 90218 - DNA, 40 bp, Homo sapiens
acataatcccggtccttaggtagtgctagtgtggtctgta

SEQ ID NO: 90219 - DNA, 40 bp, Homo sapiens
tacagaccacactagcactacctaaggaccgggattatgt

SEQ ID NO: 90220 - DNA, 40 bp, Homo sapiens
cataatcccggtccttaggtagtgctagtgtggtctgtaa

SEQ ID NO: 90221 - DNA, 40 bp, Homo sapiens
ttacagaccacactagcactacctaaggaccgggattatg

SEQ ID NO: 90222 - DNA, 40 bp, Homo sapiens
ataatcccggtccttaggtagtgctagtgtggtctgtaat

SEQ ID NO: 90223 - DNA, 40 bp, Homo sapiens
attacagaccacactagcactacctaaggaccgggattat

SEQ ID NO: 90224 - DNA, 40 bp, Homo sapiens
taatcccggtccttaggtagtgctagtgtggtctgtaata

SEQ ID NO: 90225 - DNA, 40 bp, Homo sapiens
tattacagaccacactagcactacctaaggaccgggatta

SEQ ID NO: 90226 - DNA, 40 bp, Homo sapiens
aatcccggtccttaggtagtgctagtgtggtctgtaatat

SEQ ID NO: 90227 - DNA, 40 bp, Homo sapiens
atattacagaccacactagcactacctaaggaccgggatt

SEQ ID NO: 90228 - DNA, 40 bp, Homo sapiens
atcccggtccttaggtagtgctagtgtggtctgtaatatc

SEQ ID NO: 90229 - DNA, 40 bp, Homo sapiens
gatattacagaccacactagcactacctaaggaccgggat

SEQ ID NO: 90230 - DNA, 40 bp, Homo sapiens
tcccggtccttaggtagtgctagtgtggtctgtaatatct

SEQ ID NO: 90231 - DNA, 40 bp, Homo sapiens
agatattacagaccacactagcactacctaaggaccggga

SEQ ID NO: 90232 - DNA, 40 bp, Homo sapiens
cccggtccttaggtagtgctagtgtggtctgtaatatctt

SEQ ID NO: 90233 - DNA, 40 bp, Homo sapiens
aagatattacagaccacactagcactacctaaggaccggg

SEQ ID NO: 90234 - DNA, 40 bp, Homo sapiens
ccggtccttaggtagtgctagtgtggtctgtaatatctta

SEQ ID NO: 90235 - DNA, 40 bp, Homo sapiens
taagatattacagaccacactagcactacctaaggaccgg

SEQ ID NO: 90236 - DNA, 40 bp, Homo sapiens
cggtccttaggtagtgctagtgtggtctgtaatatcttac

SEQ ID NO: 90237 - DNA, 40 bp, Homo sapiens
gtaagatattacagaccacactagcactacctaaggaccg

SEQ ID NO: 90238 - DNA, 40 bp, Homo sapiens
ggtccttaggtagtgctagtgtggtctgtaatatcttact

SEQ ID NO: 90239 - DNA, 40 bp, Homo sapiens
agtaagatattacagaccacactagcactacctaaggacc

SEQ ID NO: 90240 - DNA, 40 bp, Homo sapiens
gtccttaggtagtgctagtgtggtctgtaatatcttacta

SEQ ID NO: 90241 - DNA, 40 bp, Homo sapiens
tagtaagatattacagaccacactagcactacctaaggac

SEQ ID NO: 90242 - DNA, 40 bp, Homo sapiens
tccttaggtagtgctagtgtggtctgtaatatcttactaa

SEQ ID NO: 90243 - DNA, 40 bp, Homo sapiens
ttagtaagatattacagaccacactagcactacctaagga

SEQ ID NO: 90244 - DNA, 40 bp, Homo sapiens
ccttaggtagtgctagtgtggtctgtaatatcttactaag

SEQ ID NO: 90245 - DNA, 40 bp, Homo sapiens
cttagtaagatattacagaccacactagcactacctaagg

SEQ ID NO: 90246 - DNA, 40 bp, Homo sapiens
cttaggtagtgctagtgtggtctgtaatatcttactaagg

SEQ ID NO: 90247 - DNA, 40 bp, Homo sapiens
ccttagtaagatattacagaccacactagcactacctaag

SEQ ID NO: 90248 - DNA, 40 bp, Homo sapiens
ttaggtagtgctagtgtggtctgtaatatcttactaaggc

SEQ ID NO: 90249 - DNA, 40 bp, Homo sapiens
gccttagtaagatattacagaccacactagcactacctaa

SEQ ID NO: 90250 - DNA, 40 bp, Homo sapiens
taggtagtgctagtgtggtctgtaatatcttactaaggcc

SEQ ID NO: 90251 - DNA, 40 bp, Homo sapiens
ggccttagtaagatattacagaccacactagcactaccta

SEQ ID NO: 90252 - DNA, 40 bp, Homo sapiens
aggtagtgctagtgtggtctgtaatatcttactaaggcct

SEQ ID NO: 90253 - DNA, 40 bp, Homo sapiens
aggccttagtaagatattacagaccacactagcactacct

SEQ ID NO: 90254 - DNA, 40 bp, Homo sapiens
ggtagtgctagtgtggtctgtaatatcttactaaggcctt

SEQ ID NO: 90255 - DNA, 40 bp, Homo sapiens
aaggccttagtaagatattacagaccacactagcactacc

SEQ ID NO: 90256 - DNA, 40 bp, Homo sapiens
gtagtgctagtgtggtctgtaatatcttactaaggccttt

SEQ ID NO: 90257 - DNA, 40 bp, Homo sapiens
aaaggccttagtaagatattacagaccacactagcactac

SEQ ID NO: 90258 - DNA, 40 bp, Homo sapiens
tagtgctagtgtggtctgtaatatcttactaaggcctttg

SEQ ID NO: 90259 - DNA, 40 bp, Homo sapiens
caaaggccttagtaagatattacagaccacactagcacta

SEQ ID NO: 90260 - DNA, 40 bp, Homo sapiens
agtgctagtgtggtctgtaatatcttactaaggcctttgg

SEQ ID NO: 90261 - DNA, 40 bp, Homo sapiens
ccaaaggccttagtaagatattacagaccacactagcact

SEQ ID NO: 90262 - DNA, 40 bp, Homo sapiens
gtgctagtgtggtctgtaatatcttactaaggcctttggt

SEQ ID NO: 90263 - DNA, 40 bp, Homo sapiens
accaaaggccttagtaagatattacagaccacactagcac

SEQ ID NO: 90264 - DNA, 40 bp, Homo sapiens
tgctagtgtggtctgtaatatcttactaaggcctttggta

SEQ ID NO: 90265 - DNA, 40 bp, Homo sapiens
taccaaaggccttagtaagatattacagaccacactagca

SEQ ID NO: 90266 - DNA, 40 bp, Homo sapiens
gctagtgtggtctgtaatatcttactaaggcctttggtat

SEQ ID NO: 90267 - DNA, 40 bp, Homo sapiens
ataccaaaggccttagtaagatattacagaccacactagc

SEQ ID NO: 90268 - DNA, 40 bp, Homo sapiens
ctagtgtggtctgtaatatcttactaaggcctttggtata

SEQ ID NO: 90269 - DNA, 40 bp, Homo sapiens
tataccaaaggccttagtaagatattacagaccacactag

SEQ ID NO: 90270 - DNA, 40 bp, Homo sapiens
tagtgtggtctgtaatatcttactaaggcctttggtatac

SEQ ID NO: 90271 - DNA, 40 bp, Homo sapiens
gtataccaaaggccttagtaagatattacagaccacacta

SEQ ID NO: 90272 - DNA, 40 bp, Homo sapiens
agtgtggtctgtaatatcttactaaggcctttggtatacg

SEQ ID NO: 90273 - DNA, 40 bp, Homo sapiens
cgtataccaaaggccttagtaagatattacagaccacact

SEQ ID NO: 90274 - DNA, 40 bp, Homo sapiens
gtgtggtctgtaatatcttactaaggcctttggtatacga

SEQ ID NO: 90275 - DNA, 40 bp, Homo sapiens
tcgtataccaaaggccttagtaagatattacagaccacac

SEQ ID NO: 90276 - DNA, 40 bp, Homo sapiens
tgtggtctgtaatatcttactaaggcctttggtatacgac

SEQ ID NO: 90277 - DNA, 40 bp, Homo sapiens
gtcgtataccaaaggccttagtaagatattacagaccaca

SEQ ID NO: 90278 - DNA, 40 bp, Homo sapiens
gtggtctgtaatatcttactaaggcctttggtatacgacc

SEQ ID NO: 90279 - DNA, 40 bp, Homo sapiens
ggtcgtataccaaaggccttagtaagatattacagaccac

SEQ ID NO: 90280 - DNA, 40 bp, Homo sapiens
tggtctgtaatatcttactaaggcctttggtatacgaccc

SEQ ID NO: 90281 - DNA, 40 bp, Homo sapiens
gggtcgtataccaaaggccttagtaagatattacagacca

SEQ ID NO: 90282 - DNA, 40 bp, Homo sapiens
ggtctgtaatatcttactaaggcctttggtatacgaccca

SEQ ID NO: 90283 - DNA, 40 bp, Homo sapiens
tgggtcgtataccaaaggccttagtaagatattacagacc

SEQ ID NO: 90284 - DNA, 40 bp, Homo sapiens
gtctgtaatatcttactaaggcctttggtatacgacccag

SEQ ID NO: 90285 - DNA, 40 bp, Homo sapiens
ctgggtcgtataccaaaggccttagtaagatattacagac

SEQ ID NO: 90286 - DNA, 40 bp, Homo sapiens
tctgtaatatcttactaaggcctttggtatacgacccaga

SEQ ID NO: 90287 - DNA, 40 bp, Homo sapiens
tctgggtcgtataccaaaggccttagtaagatattacaga

SEQ ID NO: 90288 - DNA, 40 bp, Homo sapiens
ctgtaatatcttactaaggcctttggtatacgacccagag

SEQ ID NO: 90289 - DNA, 40 bp, Homo sapiens
ctctgggtcgtataccaaaggccttagtaagatattacag

SEQ ID NO: 90290 - DNA, 40 bp, Homo sapiens
tgtaatatcttactaaggcctttggtatacgacccagaga

SEQ ID NO: 90291 - DNA, 40 bp, Homo sapiens
tctctgggtcgtataccaaaggccttagtaagatattaca

SEQ ID NO: 90292 - DNA, 40 bp, Homo sapiens
gtaatatcttactaaggcctttggtatacgacccagagat

SEQ ID NO: 90293 - DNA, 40 bp, Homo sapiens
atctctgggtcgtataccaaaggccttagtaagatattac

SEQ ID NO: 90294 - DNA, 40 bp, Homo sapiens
taatatcttactaaggcctttggtatacgacccagagata

SEQ ID NO: 90295 - DNA, 40 bp, Homo sapiens
tatctctgggtcgtataccaaaggccttagtaagatatta

SEQ ID NO: 90296 - DNA, 40 bp, Homo sapiens
aatatcttactaaggcctttggtatacgacccagagataa

SEQ ID NO: 90297 - DNA, 40 bp, Homo sapiens
ttatctctgggtcgtataccaaaggccttagtaagatatt

SEQ ID NO: 90298 - DNA, 40 bp, Homo sapiens
atatcttactaaggcctttggtatacgacccagagataac

SEQ ID NO: 90299 - DNA, 40 bp, Homo sapiens
gttatctctgggtcgtataccaaaggccttagtaagatat

SEQ ID NO: 90300 - DNA, 40 bp, Homo sapiens
tatcttactaaggcctttggtatacgacccagagataaca

SEQ ID NO: 90301 - DNA, 40 bp, Homo sapiens
tgttatctctgggtcgtataccaaaggccttagtaagata

SEQ ID NO: 90302 - DNA, 40 bp, Homo sapiens
atcttactaaggcctttggtatacgacccagagataacac

SEQ ID NO: 90303 - DNA, 40 bp, Homo sapiens
gtgttatctctgggtcgtataccaaaggccttagtaagat

SEQ ID NO: 90304 - DNA, 40 bp, Homo sapiens
tcttactaaggcctttggtatacgacccagagataacacg

SEQ ID NO: 90305 - DNA, 40 bp, Homo sapiens
cgtgttatctctgggtcgtataccaaaggccttagtaaga

SEQ ID NO: 90306 - DNA, 40 bp, Homo sapiens
cttactaaggcctttggtatacgacccagagataacacga

SEQ ID NO: 90307 - DNA, 40 bp, Homo sapiens
tcgtgttatctctgggtcgtataccaaaggccttagtaag

SEQ ID NO: 90308 - DNA, 40 bp, Homo sapiens
ttactaaggcctttggtatacgacccagagataacacgat

SEQ ID NO: 90309 - DNA, 40 bp, Homo sapiens
atcgtgttatctctgggtcgtataccaaaggccttagtaa

SEQ ID NO: 90310 - DNA, 40 bp, Homo sapiens
tactaaggcctttggtatacgacccagagataacacgatg

SEQ ID NO: 90311 - DNA, 40 bp, Homo sapiens
catcgtgttatctctgggtcgtataccaaaggccttagta

SEQ ID NO: 90312 - DNA, 40 bp, Homo sapiens
actaaggcctttggtatacgacccagagataacacgatgc

SEQ ID NO: 90313 - DNA, 40 bp, Homo sapiens
gcatcgtgttatctctgggtcgtataccaaaggccttagt

SEQ ID NO: 90314 - DNA, 40 bp, Homo sapiens
ctaaggcctttggtatacgacccagagataacacgatgcg

SEQ ID NO: 90315 - DNA, 40 bp, Homo sapiens
cgcatcgtgttatctctgggtcgtataccaaaggccttag

SEQ ID NO: 90316 - DNA, 40 bp, Homo sapiens
taaggcctttggtatacgacccagagataacacgatgcgt

SEQ ID NO: 90317 - DNA, 40 bp, Homo sapiens
acgcatcgtgttatctctgggtcgtataccaaaggcctta

SEQ ID NO: 90318 - DNA, 40 bp, Homo sapiens
aaggcctttggtatacgacccagagataacacgatgcgta

SEQ ID NO: 90319 - DNA, 40 bp, Homo sapiens
tacgcatcgtgttatctctgggtcgtataccaaaggcctt

SEQ ID NO: 90320 - DNA, 40 bp, Homo sapiens
aggcctttggtatacgacccagagataacacgatgcgtat

SEQ ID NO: 90321 - DNA, 40 bp, Homo sapiens
atacgcatcgtgttatctctgggtcgtataccaaaggcct

SEQ ID NO: 90322 - DNA, 40 bp, Homo sapiens
ggcctttggtatacgacccagagataacacgatgcgtatt

SEQ ID NO: 90323 - DNA, 40 bp, Homo sapiens
aatacgcatcgtgttatctctgggtcgtataccaaaggcc

SEQ ID NO: 90324 - DNA, 40 bp, Homo sapiens
gcctttggtatacgacccagagataacacgatgcgtattt

SEQ ID NO: 90325 - DNA, 40 bp, Homo sapiens
aaatacgcatcgtgttatctctgggtcgtataccaaaggc

SEQ ID NO: 90326 - DNA, 40 bp, Homo sapiens
cctttggtatacgacccagagataacacgatgcgtatttt

SEQ ID NO: 90327 - DNA, 40 bp, Homo sapiens
aaaatacgcatcgtgttatctctgggtcgtataccaaagg

SEQ ID NO: 90328 - DNA, 40 bp, Homo sapiens
ctttggtatacgacccagagataacacgatgcgtatttta

SEQ ID NO: 90329 - DNA, 40 bp, Homo sapiens
taaaatacgcatcgtgttatctctgggtcgtataccaaag

SEQ ID NO: 90330 - DNA, 40 bp, Homo sapiens
tttggtatacgacccagagataacacgatgcgtattttag

SEQ ID NO: 90331 - DNA, 40 bp, Homo sapiens
ctaaaatacgcatcgtgttatctctgggtcgtataccaaa

SEQ ID NO: 90332 - DNA, 40 bp, Homo sapiens
ttggtatacgacccagagataacacgatgcgtattttagt

SEQ ID NO: 90333 - DNA, 40 bp, Homo sapiens
actaaaatacgcatcgtgttatctctgggtcgtataccaa

SEQ ID NO: 90334 - DNA, 40 bp, Homo sapiens
tggtatacgacccagagataacacgatgcgtattttagtt

SEQ ID NO: 90335 - DNA, 40 bp, Homo sapiens
aactaaaatacgcatcgtgttatctctgggtcgtatacca

SEQ ID NO: 90336 - DNA, 40 bp, Homo sapiens
ggtatacgacccagagataacacgatgcgtattttagttt

SEQ ID NO: 90337 - DNA, 40 bp, Homo sapiens
aaactaaaatacgcatcgtgttatctctgggtcgtatacc

SEQ ID NO: 90338 - DNA, 40 bp, Homo sapiens
gtatacgacccagagataacacgatgcgtattttagtttt

SEQ ID NO: 90339 - DNA, 40 bp, Homo sapiens
aaaactaaaatacgcatcgtgttatctctgggtcgtatac

SEQ ID NO: 90340 - DNA, 40 bp, Homo sapiens
tatacgacccagagataacacgatgcgtattttagttttg

SEQ ID NO: 90341 - DNA, 40 bp, Homo sapiens
caaaactaaaatacgcatcgtgttatctctgggtcgtata

SEQ ID NO: 90342 - DNA, 40 bp, Homo sapiens
atacgacccagagataacacgatgcgtattttagttttgc

SEQ ID NO: 90343 - DNA, 40 bp, Homo sapiens
gcaaaactaaaatacgcatcgtgttatctctgggtcgtat

SEQ ID NO: 90344 - DNA, 40 bp, Homo sapiens
tacgacccagagataacacgatgcgtattttagttttgca

SEQ ID NO: 90345 - DNA, 40 bp, Homo sapiens
tgcaaaactaaaatacgcatcgtgttatctctgggtcgta

SEQ ID NO: 90346 - DNA, 40 bp, Homo sapiens
acgacccagagataacacgatgcgtattttagttttgcaa

SEQ ID NO: 90347 - DNA, 40 bp, Homo sapiens
ttgcaaaactaaaatacgcatcgtgttatctctgggtcgt

SEQ ID NO: 90348 - DNA, 40 bp, Homo sapiens
cgacccagagataacacgatgcgtattttagttttgcaaa

SEQ ID NO: 90349 - DNA, 40 bp, Homo sapiens
tttgcaaaactaaaatacgcatcgtgttatctctgggtcg

SEQ ID NO: 90350 - DNA, 40 bp, Homo sapiens
gacccagagataacacgatgcgtattttagttttgcaaag

SEQ ID NO: 90351 - DNA, 40 bp, Homo sapiens
ctttgcaaaactaaaatacgcatcgtgttatctctgggtc

SEQ ID NO: 90352 - DNA, 40 bp, Homo sapiens
acccagagataacacgatgcgtattttagttttgcaaaga

SEQ ID NO: 90353 - DNA, 40 bp, Homo sapiens
tctttgcaaaactaaaatacgcatcgtgttatctctgggt

SEQ ID NO: 90354 - DNA, 40 bp, Homo sapiens
cccagagataacacgatgcgtattttagttttgcaaagaa

SEQ ID NO: 90355 - DNA, 40 bp, Homo sapiens
ttctttgcaaaactaaaatacgcatcgtgttatctctggg

SEQ ID NO: 90356 - DNA, 40 bp, Homo sapiens
ccagagataacacgatgcgtattttagttttgcaaagaag

SEQ ID NO: 90357 - DNA, 40 bp, Homo sapiens
cttctttgcaaaactaaaatacgcatcgtgttatctctgg

SEQ ID NO: 90358 - DNA, 40 bp, Homo sapiens
cagagataacacgatgcgtattttagttttgcaaagaagg

SEQ ID NO: 90359 - DNA, 40 bp, Homo sapiens
ccttctttgcaaaactaaaatacgcatcgtgttatctctg

SEQ ID NO: 90360 - DNA, 40 bp, Homo sapiens
agagataacacgatgcgtattttagttttgcaaagaaggg

SEQ ID NO: 90361 - DNA, 40 bp, Homo sapiens
cccttctttgcaaaactaaaatacgcatcgtgttatctct

SEQ ID NO: 90362 - DNA, 40 bp, Homo sapiens
gagataacacgatgcgtattttagttttgcaaagaagggg

SEQ ID NO: 90363 - DNA, 40 bp, Homo sapiens
ccccttctttgcaaaactaaaatacgcatcgtgttatctc

SEQ ID NO: 90364 - DNA, 40 bp, Homo sapiens
agataacacgatgcgtattttagttttgcaaagaaggggt

SEQ ID NO: 90365 - DNA, 40 bp, Homo sapiens
accccttctttgcaaaactaaaatacgcatcgtgttatct

SEQ ID NO: 90366 - DNA, 40 bp, Homo sapiens
gataacacgatgcgtattttagttttgcaaagaaggggtt

SEQ ID NO: 90367 - DNA, 40 bp, Homo sapiens
aaccccttctttgcaaaactaaaatacgcatcgtgttatc

SEQ ID NO: 90368 - DNA, 40 bp, Homo sapiens
ataacacgatgcgtattttagttttgcaaagaaggggttt

SEQ ID NO: 90369 - DNA, 40 bp, Homo sapiens
aaaccccttctttgcaaaactaaaatacgcatcgtgttat

SEQ ID NO: 90370 - DNA, 40 bp, Homo sapiens
taacacgatgcgtattttagttttgcaaagaaggggtttg

SEQ ID NO: 90371 - DNA, 40 bp, Homo sapiens
caaaccccttctttgcaaaactaaaatacgcatcgtgtta

SEQ ID NO: 90372 - DNA, 40 bp, Homo sapiens
aacacgatgcgtattttagttttgcaaagaaggggtttgg

SEQ ID NO: 90373 - DNA, 40 bp, Homo sapiens
ccaaaccccttctttgcaaaactaaaatacgcatcgtgtt

SEQ ID NO: 90374 - DNA, 40 bp, Homo sapiens
acacgatgcgtattttagttttgcaaagaaggggtttggt

SEQ ID NO: 90375 - DNA, 40 bp, Homo sapiens
accaaaccccttctttgcaaaactaaaatacgcatcgtgt

SEQ ID NO: 90376 - DNA, 40 bp, Homo sapiens
cacgatgcgtattttagttttgcaaagaaggggtttggtc

SEQ ID NO: 90377 - DNA, 40 bp, Homo sapiens
gaccaaaccccttctttgcaaaactaaaatacgcatcgtg

SEQ ID NO: 90378 - DNA, 40 bp, Homo sapiens
acgatgcgtattttagttttgcaaagaaggggtttggtct

SEQ ID NO: 90379 - DNA, 40 bp, Homo sapiens
agaccaaaccccttctttgcaaaactaaaatacgcatcgt

SEQ ID NO: 90380 - DNA, 40 bp, Homo sapiens
cgatgcgtattttagttttgcaaagaaggggtttggtctc

SEQ ID NO: 90381 - DNA, 40 bp, Homo sapiens
gagaccaaaccccttctttgcaaaactaaaatacgcatcg

SEQ ID NO: 90382 - DNA, 40 bp, Homo sapiens
gatgcgtattttagttttgcaaagaaggggtttggtctct

SEQ ID NO: 90383 - DNA, 40 bp, Homo sapiens
agagaccaaaccccttctttgcaaaactaaaatacgcatc

SEQ ID NO: 90384 - DNA, 40 bp, Homo sapiens
atgcgtattttagttttgcaaagaaggggtttggtctctg

SEQ ID NO: 90385 - DNA, 40 bp, Homo sapiens
cagagaccaaaccccttctttgcaaaactaaaatacgcat

SEQ ID NO: 90386 - DNA, 40 bp, Homo sapiens
tgcgtattttagttttgcaaagaaggggtttggtctctgt

SEQ ID NO: 90387 - DNA, 40 bp, Homo sapiens
acagagaccaaaccccttctttgcaaaactaaaatacgca

SEQ ID NO: 90388 - DNA, 40 bp, Homo sapiens
gcgtattttagttttgcaaagaaggggtttggtctctgtg

SEQ ID NO: 90389 - DNA, 40 bp, Homo sapiens
cacagagaccaaaccccttctttgcaaaactaaaatacgc

SEQ ID NO: 90390 - DNA, 40 bp, Homo sapiens
cgtattttagttttgcaaagaaggggtttggtctctgtgc

SEQ ID NO: 90391 - DNA, 40 bp, Homo sapiens
gcacagagaccaaaccccttctttgcaaaactaaaatacg

SEQ ID NO: 90392 - DNA, 40 bp, Homo sapiens
gtattttagttttgcaaagaaggggtttggtctctgtgcc

SEQ ID NO: 90393 - DNA, 40 bp, Homo sapiens
ggcacagagaccaaaccccttctttgcaaaactaaaatac

SEQ ID NO: 90394 - DNA, 40 bp, Homo sapiens
tattttagttttgcaaagaaggggtttggtctctgtgcca

SEQ ID NO: 90395 - DNA, 40 bp, Homo sapiens
tggcacagagaccaaaccccttctttgcaaaactaaaata

SEQ ID NO: 90396 - DNA, 40 bp, Homo sapiens
attttagttttgcaaagaaggggtttggtctctgtgccag

SEQ ID NO: 90397 - DNA, 40 bp, Homo sapiens
ctggcacagagaccaaaccccttctttgcaaaactaaaat

SEQ ID NO: 90398 - DNA, 40 bp, Homo sapiens
ttttagttttgcaaagaaggggtttggtctctgtgccagc

SEQ ID NO: 90399 - DNA, 40 bp, Homo sapiens
gctggcacagagaccaaaccccttctttgcaaaactaaaa

SEQ ID NO: 90400 - DNA, 40 bp, Homo sapiens
tttagttttgcaaagaaggggtttggtctctgtgccagct

SEQ ID NO: 90401 - DNA, 40 bp, Homo sapiens
agctggcacagagaccaaaccccttctttgcaaaactaaa

SEQ ID NO: 90402 - DNA, 40 bp, Homo sapiens
ttagttttgcaaagaaggggtttggtctctgtgccagctc

SEQ ID NO: 90403 - DNA, 40 bp, Homo sapiens
gagctggcacagagaccaaaccccttctttgcaaaactaa

SEQ ID NO: 90404 - DNA, 40 bp, Homo sapiens
tagttttgcaaagaaggggtttggtctctgtgccagctct

SEQ ID NO: 90405 - DNA, 40 bp, Homo sapiens
agagctggcacagagaccaaaccccttctttgcaaaacta

SEQ ID NO: 90406 - DNA, 40 bp, Homo sapiens
agttttgcaaagaaggggtttggtctctgtgccagctcta

SEQ ID NO: 90407 - DNA, 40 bp, Homo sapiens
tagagctggcacagagaccaaaccccttctttgcaaaact

SEQ ID NO: 90408 - DNA, 40 bp, Homo sapiens
gttttgcaaagaaggggtttggtctctgtgccagctctat

SEQ ID NO: 90409 - DNA, 40 bp, Homo sapiens
atagagctggcacagagaccaaaccccttctttgcaaaac

SEQ ID NO: 90410 - DNA, 40 bp, Homo sapiens
ttttgcaaagaaggggtttggtctctgtgccagctctata

SEQ ID NO: 90411 - DNA, 40 bp, Homo sapiens
tatagagctggcacagagaccaaaccccttctttgcaaaa

SEQ ID NO: 90412 - DNA, 40 bp, Homo sapiens
tttgcaaagaaggggtttggtctctgtgccagctctataa

SEQ ID NO: 90413 - DNA, 40 bp, Homo sapiens
ttatagagctggcacagagaccaaaccccttctttgcaaa

SEQ ID NO: 90414 - DNA, 40 bp, Homo sapiens
ttgcaaagaaggggtttggtctctgtgccagctctataat

SEQ ID NO: 90415 - DNA, 40 bp, Homo sapiens
attatagagctggcacagagaccaaaccccttctttgcaa

SEQ ID NO: 90416 - DNA, 40 bp, Homo sapiens
tgcaaagaaggggtttggtctctgtgccagctctataatt

SEQ ID NO: 90417 - DNA, 40 bp, Homo sapiens
aattatagagctggcacagagaccaaaccccttctttgca

SEQ ID NO: 90418 - DNA, 40 bp, Homo sapiens
gcaaagaaggggtttggtctctgtgccagctctataattg

SEQ ID NO: 90419 - DNA, 40 bp, Homo sapiens
caattatagagctggcacagagaccaaaccccttctttgc

SEQ ID NO: 90420 - DNA, 40 bp, Homo sapiens
caaagaaggggtttggtctctgtgccagctctataattgt

SEQ ID NO: 90421 - DNA, 40 bp, Homo sapiens
acaattatagagctggcacagagaccaaaccccttctttg

SEQ ID NO: 90422 - DNA, 40 bp, Homo sapiens
aaagaaggggtttggtctctgtgccagctctataattgtt

SEQ ID NO: 90423 - DNA, 40 bp, Homo sapiens
aacaattatagagctggcacagagaccaaaccccttcttt

SEQ ID NO: 90424 - DNA, 40 bp, Homo sapiens
aagaaggggtttggtctctgtgccagctctataattgttt

SEQ ID NO: 90425 - DNA, 40 bp, Homo sapiens
aaacaattatagagctggcacagagaccaaaccccttctt

SEQ ID NO: 90426 - DNA, 40 bp, Homo sapiens
agaaggggtttggtctctgtgccagctctataattgtttt

SEQ ID NO: 90427 - DNA, 40 bp, Homo sapiens
aaaacaattatagagctggcacagagaccaaaccccttct

SEQ ID NO: 90428 - DNA, 40 bp, Homo sapiens
gaaggggtttggtctctgtgccagctctataattgttttg

SEQ ID NO: 90429 - DNA, 40 bp, Homo sapiens
caaaacaattatagagctggcacagagaccaaaccccttc

SEQ ID NO: 90430 - DNA, 40 bp, Homo sapiens
aaggggtttggtctctgtgccagctctataattgttttgc

SEQ ID NO: 90431 - DNA, 40 bp, Homo sapiens
gcaaaacaattatagagctggcacagagaccaaacccctt

SEQ ID NO: 90432 - DNA, 40 bp, Homo sapiens
aggggtttggtctctgtgccagctctataattgttttgct

SEQ ID NO: 90433 - DNA, 40 bp, Homo sapiens
agcaaaacaattatagagctggcacagagaccaaacccct

SEQ ID NO: 90434 - DNA, 40 bp, Homo sapiens
ggggtttggtctctgtgccagctctataattgttttgcta

SEQ ID NO: 90435 - DNA, 40 bp, Homo sapiens
tagcaaaacaattatagagctggcacagagaccaaacccc

SEQ ID NO: 90436 - DNA, 40 bp, Homo sapiens
gggtttggtctctgtgccagctctataattgttttgctac

SEQ ID NO: 90437 - DNA, 40 bp, Homo sapiens
gtagcaaaacaattatagagctggcacagagaccaaaccc

SEQ ID NO: 90438 - DNA, 40 bp, Homo sapiens
ggtttggtctctgtgccagctctataattgttttgctacg

SEQ ID NO: 90439 - DNA, 40 bp, Homo sapiens
cgtagcaaaacaattatagagctggcacagagaccaaacc

SEQ ID NO: 90440 - DNA, 40 bp, Homo sapiens
gtttggtctctgtgccagctctataattgttttgctacga

SEQ ID NO: 90441 - DNA, 40 bp, Homo sapiens
tcgtagcaaaacaattatagagctggcacagagaccaaac

SEQ ID NO: 90442 - DNA, 40 bp, Homo sapiens
tttggtctctgtgccagctctataattgttttgctacgat

SEQ ID NO: 90443 - DNA, 40 bp, Homo sapiens
atcgtagcaaaacaattatagagctggcacagagaccaaa

SEQ ID NO: 90444 - DNA, 40 bp, Homo sapiens
ttggtctctgtgccagctctataattgttttgctacgatt

SEQ ID NO: 90445 - DNA, 40 bp, Homo sapiens
aatcgtagcaaaacaattatagagctggcacagagaccaa

SEQ ID NO: 90446 - DNA, 40 bp, Homo sapiens
tggtctctgtgccagctctataattgttttgctacgattc

SEQ ID NO: 90447 - DNA, 40 bp, Homo sapiens
gaatcgtagcaaaacaattatagagctggcacagagacca

SEQ ID NO: 90448 - DNA, 40 bp, Homo sapiens
ggtctctgtgccagctctataattgttttgctacgattcc

SEQ ID NO: 90449 - DNA, 40 bp, Homo sapiens
ggaatcgtagcaaaacaattatagagctggcacagagacc

SEQ ID NO: 90450 - DNA, 40 bp, Homo sapiens
gtctctgtgccagctctataattgttttgctacgattcca

SEQ ID NO: 90451 - DNA, 40 bp, Homo sapiens
tggaatcgtagcaaaacaattatagagctggcacagagac

SEQ ID NO: 90452 - DNA, 40 bp, Homo sapiens
tctctgtgccagctctataattgttttgctacgattccac

SEQ ID NO: 90453 - DNA, 40 bp, Homo sapiens
gtggaatcgtagcaaaacaattatagagctggcacagaga

SEQ ID NO: 90454 - DNA, 40 bp, Homo sapiens
ctctgtgccagctctataattgttttgctacgattccact

SEQ ID NO: 90455 - DNA, 40 bp, Homo sapiens
agtggaatcgtagcaaaacaattatagagctggcacagag

SEQ ID NO: 90456 - DNA, 40 bp, Homo sapiens
tctgtgccagctctataattgttttgctacgattccactg

SEQ ID NO: 90457 - DNA, 40 bp, Homo sapiens
cagtggaatcgtagcaaaacaattatagagctggcacaga

SEQ ID NO: 90458 - DNA, 40 bp, Homo sapiens
ctgtgccagctctataattgttttgctacgattccactga

SEQ ID NO: 90459 - DNA, 40 bp, Homo sapiens
tcagtggaatcgtagcaaaacaattatagagctggcacag

SEQ ID NO: 90460 - DNA, 40 bp, Homo sapiens
tgtgccagctctataattgttttgctacgattccactgaa

SEQ ID NO: 90461 - DNA, 40 bp, Homo sapiens
ttcagtggaatcgtagcaaaacaattatagagctggcaca

SEQ ID NO: 90462 - DNA, 40 bp, Homo sapiens
gtgccagctctataattgttttgctacgattccactgaaa

SEQ ID NO: 90463 - DNA, 40 bp, Homo sapiens
tttcagtggaatcgtagcaaaacaattatagagctggcac

SEQ ID NO: 90464 - DNA, 40 bp, Homo sapiens
tgccagctctataattgttttgctacgattccactgaaac

SEQ ID NO: 90465 - DNA, 40 bp, Homo sapiens
gtttcagtggaatcgtagcaaaacaattatagagctggca

SEQ ID NO: 90466 - DNA, 40 bp, Homo sapiens
gccagctctataattgttttgctacgattccactgaaact

SEQ ID NO: 90467 - DNA, 40 bp, Homo sapiens
agtttcagtggaatcgtagcaaaacaattatagagctggc

SEQ ID NO: 90468 - DNA, 40 bp, Homo sapiens
ccagctctataattgttttgctacgattccactgaaactc

SEQ ID NO: 90469 - DNA, 40 bp, Homo sapiens
gagtttcagtggaatcgtagcaaaacaattatagagctgg

SEQ ID NO: 90470 - DNA, 40 bp, Homo sapiens
cagctctataattgttttgctacgattccactgaaactct

SEQ ID NO: 90471 - DNA, 40 bp, Homo sapiens
agagtttcagtggaatcgtagcaaaacaattatagagctg

SEQ ID NO: 90472 - DNA, 40 bp, Homo sapiens
agctctataattgttttgctacgattccactgaaactctt

SEQ ID NO: 90473 - DNA, 40 bp, Homo sapiens
aagagtttcagtggaatcgtagcaaaacaattatagagct

SEQ ID NO: 90474 - DNA, 40 bp, Homo sapiens
gctctataattgttttgctacgattccactgaaactcttc

SEQ ID NO: 90475 - DNA, 40 bp, Homo sapiens
gaagagtttcagtggaatcgtagcaaaacaattatagagc

SEQ ID NO: 90476 - DNA, 40 bp, Homo sapiens
ctctataattgttttgctacgattccactgaaactcttcg

SEQ ID NO: 90477 - DNA, 40 bp, Homo sapiens
cgaagagtttcagtggaatcgtagcaaaacaattatagag

SEQ ID NO: 90478 - DNA, 40 bp, Homo sapiens
tctataattgttttgctacgattccactgaaactcttcga

SEQ ID NO: 90479 - DNA, 40 bp, Homo sapiens
tcgaagagtttcagtggaatcgtagcaaaacaattataga

SEQ ID NO: 90480 - DNA, 40 bp, Homo sapiens
ctataattgttttgctacgattccactgaaactcttcgat

SEQ ID NO: 90481 - DNA, 40 bp, Homo sapiens
atcgaagagtttcagtggaatcgtagcaaaacaattatag

SEQ ID NO: 90482 - DNA, 40 bp, Homo sapiens
tataattgttttgctacgattccactgaaactcttcgatc

SEQ ID NO: 90483 - DNA, 40 bp, Homo sapiens
gatcgaagagtttcagtggaatcgtagcaaaacaattata

SEQ ID NO: 90484 - DNA, 40 bp, Homo sapiens
ataattgttttgctacgattccactgaaactcttcgatca

SEQ ID NO: 90485 - DNA, 40 bp, Homo sapiens
tgatcgaagagtttcagtggaatcgtagcaaaacaattat

SEQ ID NO: 90486 - DNA, 40 bp, Homo sapiens
taattgttttgctacgattccactgaaactcttcgatcaa

SEQ ID NO: 90487 - DNA, 40 bp, Homo sapiens
ttgatcgaagagtttcagtggaatcgtagcaaaacaatta

SEQ ID NO: 90488 - DNA, 40 bp, Homo sapiens
aattgttttgctacgattccactgaaactcttcgatcaag

SEQ ID NO: 90489 - DNA, 40 bp, Homo sapiens
cttgatcgaagagtttcagtggaatcgtagcaaaacaatt

SEQ ID NO: 90490 - DNA, 40 bp, Homo sapiens
attgttttgctacgattccactgaaactcttcgatcaagc

SEQ ID NO: 90491 - DNA, 40 bp, Homo sapiens
gcttgatcgaagagtttcagtggaatcgtagcaaaacaat

SEQ ID NO: 90492 - DNA, 40 bp, Homo sapiens
ttgttttgctacgattccactgaaactcttcgatcaagct

SEQ ID NO: 90493 - DNA, 40 bp, Homo sapiens
agcttgatcgaagagtttcagtggaatcgtagcaaaacaa

SEQ ID NO: 90494 - DNA, 40 bp, Homo sapiens
tgttttgctacgattccactgaaactcttcgatcaagcta

SEQ ID NO: 90495 - DNA, 40 bp, Homo sapiens
tagcttgatcgaagagtttcagtggaatcgtagcaaaaca

SEQ ID NO: 90496 - DNA, 40 bp, Homo sapiens
gttttgctacgattccactgaaactcttcgatcaagctac

SEQ ID NO: 90497 - DNA, 40 bp, Homo sapiens
gtagcttgatcgaagagtttcagtggaatcgtagcaaaac

SEQ ID NO: 90498 - DNA, 40 bp, Homo sapiens
ttttgctacgattccactgaaactcttcgatcaagctact

SEQ ID NO: 90499 - DNA, 40 bp, Homo sapiens
agtagcttgatcgaagagtttcagtggaatcgtagcaaaa

SEQ ID NO: 90500 - DNA, 40 bp, Homo sapiens
tttgctacgattccactgaaactcttcgatcaagctactt

SEQ ID NO: 90501 - DNA, 40 bp, Homo sapiens
aagtagcttgatcgaagagtttcagtggaatcgtagcaaa

SEQ ID NO: 90502 - DNA, 40 bp, Homo sapiens
ttgctacgattccactgaaactcttcgatcaagctacttt

SEQ ID NO: 90503 - DNA, 40 bp, Homo sapiens
aaagtagcttgatcgaagagtttcagtggaatcgtagcaa

SEQ ID NO: 90504 - DNA, 40 bp, Homo sapiens
tgctacgattccactgaaactcttcgatcaagctacttta

SEQ ID NO: 90505 - DNA, 40 bp, Homo sapiens
taaagtagcttgatcgaagagtttcagtggaatcgtagca

SEQ ID NO: 90506 - DNA, 40 bp, Homo sapiens
gctacgattccactgaaactcttcgatcaagctactttat

SEQ ID NO: 90507 - DNA, 40 bp, Homo sapiens
ataaagtagcttgatcgaagagtttcagtggaatcgtagc

SEQ ID NO: 90508 - DNA, 40 bp, Homo sapiens
ctacgattccactgaaactcttcgatcaagctactttatg

SEQ ID NO: 90509 - DNA, 40 bp, Homo sapiens
cataaagtagcttgatcgaagagtttcagtggaatcgtag

SEQ ID NO: 90510 - DNA, 40 bp, Homo sapiens
tacgattccactgaaactcttcgatcaagctactttatgt

SEQ ID NO: 90511 - DNA, 40 bp, Homo sapiens
acataaagtagcttgatcgaagagtttcagtggaatcgta

SEQ ID NO: 90512 - DNA, 40 bp, Homo sapiens
acgattccactgaaactcttcgatcaagctactttatgta

SEQ ID NO: 90513 - DNA, 40 bp, Homo sapiens
tacataaagtagcttgatcgaagagtttcagtggaatcgt

SEQ ID NO: 90514 - DNA, 40 bp, Homo sapiens
cgattccactgaaactcttcgatcaagctactttatgtaa

SEQ ID NO: 90515 - DNA, 40 bp, Homo sapiens
ttacataaagtagcttgatcgaagagtttcagtggaatcg

SEQ ID NO: 90516 - DNA, 40 bp, Homo sapiens
gattccactgaaactcttcgatcaagctactttatgtaaa

SEQ ID NO: 90517 - DNA, 40 bp, Homo sapiens
tttacataaagtagcttgatcgaagagtttcagtggaatc

SEQ ID NO: 90518 - DNA, 40 bp, Homo sapiens
attccactgaaactcttcgatcaagctactttatgtaaat

SEQ ID NO: 90519 - DNA, 40 bp, Homo sapiens
atttacataaagtagcttgatcgaagagtttcagtggaat

SEQ ID NO: 90520 - DNA, 40 bp, Homo sapiens
ttccactgaaactcttcgatcaagctactttatgtaaatc

SEQ ID NO: 90521 - DNA, 40 bp, Homo sapiens
gatttacataaagtagcttgatcgaagagtttcagtggaa

SEQ ID NO: 90522 - DNA, 40 bp, Homo sapiens
tccactgaaactcttcgatcaagctactttatgtaaatca

SEQ ID NO: 90523 - DNA, 40 bp, Homo sapiens
tgatttacataaagtagcttgatcgaagagtttcagtgga

SEQ ID NO: 90524 - DNA, 40 bp, Homo sapiens
ccactgaaactcttcgatcaagctactttatgtaaatcac

SEQ ID NO: 90525 - DNA, 40 bp, Homo sapiens
gtgatttacataaagtagcttgatcgaagagtttcagtgg

SEQ ID NO: 90526 - DNA, 40 bp, Homo sapiens
cactgaaactcttcgatcaagctactttatgtaaatcact

SEQ ID NO: 90527 - DNA, 40 bp, Homo sapiens
agtgatttacataaagtagcttgatcgaagagtttcagtg

SEQ ID NO: 90528 - DNA, 40 bp, Homo sapiens
actgaaactcttcgatcaagctactttatgtaaatcactt

SEQ ID NO: 90529 - DNA, 40 bp, Homo sapiens
aagtgatttacataaagtagcttgatcgaagagtttcagt

SEQ ID NO: 90530 - DNA, 40 bp, Homo sapiens
ctgaaactcttcgatcaagctactttatgtaaatcacttc

SEQ ID NO: 90531 - DNA, 40 bp, Homo sapiens
gaagtgatttacataaagtagcttgatcgaagagtttcag

SEQ ID NO: 90532 - DNA, 40 bp, Homo sapiens
tgaaactcttcgatcaagctactttatgtaaatcacttca

SEQ ID NO: 90533 - DNA, 40 bp, Homo sapiens
tgaagtgatttacataaagtagcttgatcgaagagtttca

SEQ ID NO: 90534 - DNA, 40 bp, Homo sapiens
gaaactcttcgatcaagctactttatgtaaatcacttcat

SEQ ID NO: 90535 - DNA, 40 bp, Homo sapiens
atgaagtgatttacataaagtagcttgatcgaagagtttc

SEQ ID NO: 90536 - DNA, 40 bp, Homo sapiens
aaactcttcgatcaagctactttatgtaaatcacttcatt

SEQ ID NO: 90537 - DNA, 40 bp, Homo sapiens
aatgaagtgatttacataaagtagcttgatcgaagagttt

SEQ ID NO: 90538 - DNA, 40 bp, Homo sapiens
aactcttcgatcaagctactttatgtaaatcacttcattg

SEQ ID NO: 90539 - DNA, 40 bp, Homo sapiens
caatgaagtgatttacataaagtagcttgatcgaagagtt

SEQ ID NO: 90540 - DNA, 40 bp, Homo sapiens
actcttcgatcaagctactttatgtaaatcacttcattgt

SEQ ID NO: 90541 - DNA, 40 bp, Homo sapiens
acaatgaagtgatttacataaagtagcttgatcgaagagt

SEQ ID NO: 90542 - DNA, 40 bp, Homo sapiens
ctcttcgatcaagctactttatgtaaatcacttcattgtt

SEQ ID NO: 90543 - DNA, 40 bp, Homo sapiens
aacaatgaagtgatttacataaagtagcttgatcgaagag

SEQ ID NO: 90544 - DNA, 40 bp, Homo sapiens
tcttcgatcaagctactttatgtaaatcacttcattgttt

SEQ ID NO: 90545 - DNA, 40 bp, Homo sapiens
aaacaatgaagtgatttacataaagtagcttgatcgaaga

SEQ ID NO: 90546 - DNA, 40 bp, Homo sapiens
cttcgatcaagctactttatgtaaatcacttcattgtttt

SEQ ID NO: 90547 - DNA, 40 bp, Homo sapiens
aaaacaatgaagtgatttacataaagtagcttgatcgaag

SEQ ID NO: 90548 - DNA, 40 bp, Homo sapiens
ttcgatcaagctactttatgtaaatcacttcattgtttta

SEQ ID NO: 90549 - DNA, 40 bp, Homo sapiens
taaaacaatgaagtgatttacataaagtagcttgatcgaa

SEQ ID NO: 90550 - DNA, 40 bp, Homo sapiens
tcgatcaagctactttatgtaaatcacttcattgttttaa

SEQ ID NO: 90551 - DNA, 40 bp, Homo sapiens
ttaaaacaatgaagtgatttacataaagtagcttgatcga

SEQ ID NO: 90552 - DNA, 40 bp, Homo sapiens
cgatcaagctactttatgtaaatcacttcattgttttaaa

SEQ ID NO: 90553 - DNA, 40 bp, Homo sapiens
tttaaaacaatgaagtgatttacataaagtagcttgatcg

SEQ ID NO: 90554 - DNA, 40 bp, Homo sapiens
gatcaagctactttatgtaaatcacttcattgttttaaag

SEQ ID NO: 90555 - DNA, 40 bp, Homo sapiens
ctttaaaacaatgaagtgatttacataaagtagcttgatc

SEQ ID NO: 90556 - DNA, 40 bp, Homo sapiens
atcaagctactttatgtaaatcacttcattgttttaaagg

SEQ ID NO: 90557 - DNA, 40 bp, Homo sapiens
cctttaaaacaatgaagtgatttacataaagtagcttgat

SEQ ID NO: 90558 - DNA, 40 bp, Homo sapiens
tcaagctactttatgtaaatcacttcattgttttaaagga

SEQ ID NO: 90559 - DNA, 40 bp, Homo sapiens
tcctttaaaacaatgaagtgatttacataaagtagcttga

SEQ ID NO: 90560 - DNA, 40 bp, Homo sapiens
caagctactttatgtaaatcacttcattgttttaaaggaa

SEQ ID NO: 90561 - DNA, 40 bp, Homo sapiens
ttcctttaaaacaatgaagtgatttacataaagtagcttg

SEQ ID NO: 90562 - DNA, 40 bp, Homo sapiens
aagctactttatgtaaatcacttcattgttttaaaggaat

SEQ ID NO: 90563 - DNA, 40 bp, Homo sapiens
attcctttaaaacaatgaagtgatttacataaagtagctt

SEQ ID NO: 90564 - DNA, 40 bp, Homo sapiens
agctactttatgtaaatcacttcattgttttaaaggaata

SEQ ID NO: 90565 - DNA, 40 bp, Homo sapiens
tattcctttaaaacaatgaagtgatttacataaagtagct

SEQ ID NO: 90566 - DNA, 40 bp, Homo sapiens
gctactttatgtaaatcacttcattgttttaaaggaataa

SEQ ID NO: 90567 - DNA, 40 bp, Homo sapiens
ttattcctttaaaacaatgaagtgatttacataaagtagc

SEQ ID NO: 90568 - DNA, 40 bp, Homo sapiens
ctactttatgtaaatcacttcattgttttaaaggaataaa

SEQ ID NO: 90569 - DNA, 40 bp, Homo sapiens
tttattcctttaaaacaatgaagtgatttacataaagtag

SEQ ID NO: 90570 - DNA, 40 bp, Homo sapiens
tactttatgtaaatcacttcattgttttaaaggaataaac

SEQ ID NO: 90571 - DNA, 40 bp, Homo sapiens
gtttattcctttaaaacaatgaagtgatttacataaagta

SEQ ID NO: 90572 - DNA, 40 bp, Homo sapiens
actttatgtaaatcacttcattgttttaaaggaataaact

SEQ ID NO: 90573 - DNA, 40 bp, Homo sapiens
agtttattcctttaaaacaatgaagtgatttacataaagt

SEQ ID NO: 90574 - DNA, 40 bp, Homo sapiens
ctttatgtaaatcacttcattgttttaaaggaataaactt

SEQ ID NO: 90575 - DNA, 40 bp, Homo sapiens
aagtttattcctttaaaacaatgaagtgatttacataaag

SEQ ID NO: 90576 - DNA, 40 bp, Homo sapiens
tttatgtaaatcacttcattgttttaaaggaataaacttg

SEQ ID NO: 90577 - DNA, 40 bp, Homo sapiens
caagtttattcctttaaaacaatgaagtgatttacataaa

SEQ ID NO: 90578 - DNA, 40 bp, Homo sapiens
ttatgtaaatcacttcattgttttaaaggaataaacttga

SEQ ID NO: 90579 - DNA, 40 bp, Homo sapiens
tcaagtttattcctttaaaacaatgaagtgatttacataa

SEQ ID NO: 90580 - DNA, 40 bp, Homo sapiens
tatgtaaatcacttcattgttttaaaggaataaacttgat

SEQ ID NO: 90581 - DNA, 40 bp, Homo sapiens
atcaagtttattcctttaaaacaatgaagtgatttacata

SEQ ID NO: 90582 - DNA, 40 bp, Homo sapiens
atgtaaatcacttcattgttttaaaggaataaacttgatt

SEQ ID NO: 90583 - DNA, 40 bp, Homo sapiens
aatcaagtttattcctttaaaacaatgaagtgatttacat

SEQ ID NO: 90584 - DNA, 40 bp, Homo sapiens
tgtaaatcacttcattgttttaaaggaataaacttgatta

SEQ ID NO: 90585 - DNA, 40 bp, Homo sapiens
taatcaagtttattcctttaaaacaatgaagtgatttaca

SEQ ID NO: 90586 - DNA, 40 bp, Homo sapiens
gtaaatcacttcattgttttaaaggaataaacttgattat

SEQ ID NO: 90587 - DNA, 40 bp, Homo sapiens
ataatcaagtttattcctttaaaacaatgaagtgatttac

SEQ ID NO: 90588 - DNA, 40 bp, Homo sapiens
taaatcacttcattgttttaaaggaataaacttgattata

SEQ ID NO: 90589 - DNA, 40 bp, Homo sapiens
tataatcaagtttattcctttaaaacaatgaagtgattta

SEQ ID NO: 90590 - DNA, 40 bp, Homo sapiens
aaatcacttcattgttttaaaggaataaacttgattatat

SEQ ID NO: 90591 - DNA, 40 bp, Homo sapiens
atataatcaagtttattcctttaaaacaatgaagtgattt

SEQ ID NO: 90592 - DNA, 40 bp, Homo sapiens
aatcacttcattgttttaaaggaataaacttgattatatt

SEQ ID NO: 90593 - DNA, 40 bp, Homo sapiens
aatataatcaagtttattcctttaaaacaatgaagtgatt

SEQ ID NO: 90594 - DNA, 40 bp, Homo sapiens
atcacttcattgttttaaaggaataaacttgattatattg

SEQ ID NO: 90595 - DNA, 40 bp, Homo sapiens
caatataatcaagtttattcctttaaaacaatgaagtgat

SEQ ID NO: 90596 - DNA, 40 bp, Homo sapiens
tcacttcattgttttaaaggaataaacttgattatattgt

SEQ ID NO: 90597 - DNA, 40 bp, Homo sapiens
acaatataatcaagtttattcctttaaaacaatgaagtga

SEQ ID NO: 90598 - DNA, 40 bp, Homo sapiens
cacttcattgttttaaaggaataaacttgattatattgtt

SEQ ID NO: 90599 - DNA, 40 bp, Homo sapiens
aacaatataatcaagtttattcctttaaaacaatgaagtg

SEQ ID NO: 90600 - DNA, 40 bp, Homo sapiens
acttcattgttttaaaggaataaacttgattatattgttt

SEQ ID NO: 90601 - DNA, 40 bp, Homo sapiens
aaacaatataatcaagtttattcctttaaaacaatgaagt

SEQ ID NO: 90602 - DNA, 40 bp, Homo sapiens
cttcattgttttaaaggaataaacttgattatattgtttt

SEQ ID NO: 90603 - DNA, 40 bp, Homo sapiens
aaaacaatataatcaagtttattcctttaaaacaatgaag

SEQ ID NO: 90604 - DNA, 40 bp, Homo sapiens
ttcattgttttaaaggaataaacttgattatattgttttt

SEQ ID NO: 90605 - DNA, 40 bp, Homo sapiens
aaaaacaatataatcaagtttattcctttaaaacaatgaa

SEQ ID NO: 90606 - DNA, 40 bp, Homo sapiens
tcattgttttaaaggaataaacttgattatattgtttttt

SEQ ID NO: 90607 - DNA, 40 bp, Homo sapiens
aaaaaacaatataatcaagtttattcctttaaaacaatga

SEQ ID NO: 90608 - DNA, 40 bp, Homo sapiens
cattgttttaaaggaataaacttgattatattgttttttt

SEQ ID NO: 90609 - DNA, 40 bp, Homo sapiens
aaaaaaacaatataatcaagtttattcctttaaaacaatg

SEQ ID NO: 90610 - DNA, 40 bp, Homo sapiens
attgttttaaaggaataaacttgattatattgttttttta

SEQ ID NO: 90611 - DNA, 40 bp, Homo sapiens
taaaaaaacaatataatcaagtttattcctttaaaacaat

SEQ ID NO: 90612 - DNA, 40 bp, Homo sapiens
ttgttttaaaggaataaacttgattatattgtttttttat

SEQ ID NO: 90613 - DNA, 40 bp, Homo sapiens
ataaaaaaacaatataatcaagtttattcctttaaaacaa

SEQ ID NO: 90614 - DNA, 40 bp, Homo sapiens
tgttttaaaggaataaacttgattatattgtttttttatt

SEQ ID NO: 90615 - DNA, 40 bp, Homo sapiens
aataaaaaaacaatataatcaagtttattcctttaaaaca

SEQ ID NO: 90616 - DNA, 40 bp, Homo sapiens
gttttaaaggaataaacttgattatattgtttttttattt

SEQ ID NO: 90617 - DNA, 40 bp, Homo sapiens
aaataaaaaaacaatataatcaagtttattcctttaaaac

SEQ ID NO: 90618 - DNA, 40 bp, Homo sapiens
ttttaaaggaataaacttgattatattgtttttttatttg

SEQ ID NO: 90619 - DNA, 40 bp, Homo sapiens
caaataaaaaaacaatataatcaagtttattcctttaaaa

SEQ ID NO: 90620 - DNA, 40 bp, Homo sapiens
tttaaaggaataaacttgattatattgtttttttatttgg

SEQ ID NO: 90621 - DNA, 40 bp, Homo sapiens
ccaaataaaaaaacaatataatcaagtttattcctttaaa

SEQ ID NO: 90622 - DNA, 40 bp, Homo sapiens
ttaaaggaataaacttgattatattgtttttttatttggc

SEQ ID NO: 90623 - DNA, 40 bp, Homo sapiens
gccaaataaaaaaacaatataatcaagtttattcctttaa

SEQ ID NO: 90624 - DNA, 40 bp, Homo sapiens
taaaggaataaacttgattatattgtttttttatttggca

SEQ ID NO: 90625 - DNA, 40 bp, Homo sapiens
tgccaaataaaaaaacaatataatcaagtttattccttta

SEQ ID NO: 90626 - DNA, 40 bp, Homo sapiens
aaaggaataaacttgattatattgtttttttatttggcat

SEQ ID NO: 90627 - DNA, 40 bp, Homo sapiens
atgccaaataaaaaaacaatataatcaagtttattccttt

SEQ ID NO: 90628 - DNA, 40 bp, Homo sapiens
aaggaataaacttgattatattgtttttttatttggcata

SEQ ID NO: 90629 - DNA, 40 bp, Homo sapiens
tatgccaaataaaaaaacaatataatcaagtttattcctt

SEQ ID NO: 90630 - DNA, 40 bp, Homo sapiens
aggaataaacttgattatattgtttttttatttggcataa

SEQ ID NO: 90631 - DNA, 40 bp, Homo sapiens
ttatgccaaataaaaaaacaatataatcaagtttattcct

SEQ ID NO: 90632 - DNA, 40 bp, Homo sapiens
ggaataaacttgattatattgtttttttatttggcataac

SEQ ID NO: 90633 - DNA, 40 bp, Homo sapiens
gttatgccaaataaaaaaacaatataatcaagtttattcc

SEQ ID NO: 90634 - DNA, 40 bp, Homo sapiens
gaataaacttgattatattgtttttttatttggcataact

SEQ ID NO: 90635 - DNA, 40 bp, Homo sapiens
agttatgccaaataaaaaaacaatataatcaagtttattc

SEQ ID NO: 90636 - DNA, 40 bp, Homo sapiens
aataaacttgattatattgtttttttatttggcataactg

SEQ ID NO: 90637 - DNA, 40 bp, Homo sapiens
cagttatgccaaataaaaaaacaatataatcaagtttatt

SEQ ID NO: 90638 - DNA, 40 bp, Homo sapiens
ataaacttgattatattgtttttttatttggcataactgt

SEQ ID NO: 90639 - DNA, 40 bp, Homo sapiens
acagttatgccaaataaaaaaacaatataatcaagtttat

SEQ ID NO: 90640 - DNA, 40 bp, Homo sapiens
taaacttgattatattgtttttttatttggcataactgtg

SEQ ID NO: 90641 - DNA, 40 bp, Homo sapiens
cacagttatgccaaataaaaaaacaatataatcaagttta

SEQ ID NO: 90642 - DNA, 40 bp, Homo sapiens
aaacttgattatattgtttttttatttggcataactgtga

SEQ ID NO: 90643 - DNA, 40 bp, Homo sapiens
tcacagttatgccaaataaaaaaacaatataatcaagttt

SEQ ID NO: 90644 - DNA, 40 bp, Homo sapiens
aacttgattatattgtttttttatttggcataactgtgat

SEQ ID NO: 90645 - DNA, 40 bp, Homo sapiens
atcacagttatgccaaataaaaaaacaatataatcaagtt

SEQ ID NO: 90646 - DNA, 40 bp, Homo sapiens
acttgattatattgtttttttatttggcataactgtgatt

SEQ ID NO: 90647 - DNA, 40 bp, Homo sapiens
aatcacagttatgccaaataaaaaaacaatataatcaagt

SEQ ID NO: 90648 - DNA, 40 bp, Homo sapiens
cttgattatattgtttttttatttggcataactgtgattc

SEQ ID NO: 90649 - DNA, 40 bp, Homo sapiens
gaatcacagttatgccaaataaaaaaacaatataatcaag

SEQ ID NO: 90650 - DNA, 40 bp, Homo sapiens
ttgattatattgtttttttatttggcataactgtgattct

SEQ ID NO: 90651 - DNA, 40 bp, Homo sapiens
agaatcacagttatgccaaataaaaaaacaatataatcaa

SEQ ID NO: 90652 - DNA, 40 bp, Homo sapiens
tgattatattgtttttttatttggcataactgtgattctt

SEQ ID NO: 90653 - DNA, 40 bp, Homo sapiens
aagaatcacagttatgccaaataaaaaaacaatataatca

SEQ ID NO: 90654 - DNA, 40 bp, Homo sapiens
gattatattgtttttttatttggcataactgtgattcttt

SEQ ID NO: 90655 - DNA, 40 bp, Homo sapiens
aaagaatcacagttatgccaaataaaaaaacaatataatc

SEQ ID NO: 90656 - DNA, 40 bp, Homo sapiens
attatattgtttttttatttggcataactgtgattctttt

SEQ ID NO: 90657 - DNA, 40 bp, Homo sapiens
aaaagaatcacagttatgccaaataaaaaaacaatataat

SEQ ID NO: 90658 - DNA, 40 bp, Homo sapiens
ttatattgtttttttatttggcataactgtgattctttta

SEQ ID NO: 90659 - DNA, 40 bp, Homo sapiens
taaaagaatcacagttatgccaaataaaaaaacaatataa

SEQ ID NO: 90660 - DNA, 40 bp, Homo sapiens
tatattgtttttttatttggcataactgtgattcttttag

SEQ ID NO: 90661 - DNA, 40 bp, Homo sapiens
ctaaaagaatcacagttatgccaaataaaaaaacaatata

SEQ ID NO: 90662 - DNA, 40 bp, Homo sapiens
atattgtttttttatttggcataactgtgattcttttagg

SEQ ID NO: 90663 - DNA, 40 bp, Homo sapiens
cctaaaagaatcacagttatgccaaataaaaaaacaatat

SEQ ID NO: 90664 - DNA, 40 bp, Homo sapiens
tattgtttttttatttggcataactgtgattcttttagga

SEQ ID NO: 90665 - DNA, 40 bp, Homo sapiens
tcctaaaagaatcacagttatgccaaataaaaaaacaata

SEQ ID NO: 90666 - DNA, 40 bp, Homo sapiens
attgtttttttatttggcataactgtgattcttttaggac

SEQ ID NO: 90667 - DNA, 40 bp, Homo sapiens
gtcctaaaagaatcacagttatgccaaataaaaaaacaat

SEQ ID NO: 90668 - DNA, 40 bp, Homo sapiens
ttgtttttttatttggcataactgtgattcttttaggaca

SEQ ID NO: 90669 - DNA, 40 bp, Homo sapiens
tgtcctaaaagaatcacagttatgccaaataaaaaaacaa

SEQ ID NO: 90670 - DNA, 40 bp, Homo sapiens
tgtttttttatttggcataactgtgattcttttaggacaa

SEQ ID NO: 90671 - DNA, 40 bp, Homo sapiens
ttgtcctaaaagaatcacagttatgccaaataaaaaaaca

SEQ ID NO: 90672 - DNA, 40 bp, Homo sapiens
gtttttttatttggcataactgtgattcttttaggacaat

SEQ ID NO: 90673 - DNA, 40 bp, Homo sapiens
attgtcctaaaagaatcacagttatgccaaataaaaaaac

SEQ ID NO: 90674 - DNA, 40 bp, Homo sapiens
tttttttatttggcataactgtgattcttttaggacaatt

SEQ ID NO: 90675 - DNA, 40 bp, Homo sapiens
aattgtcctaaaagaatcacagttatgccaaataaaaaaa

SEQ ID NO: 90676 - DNA, 40 bp, Homo sapiens
ttttttatttggcataactgtgattcttttaggacaatta

SEQ ID NO: 90677 - DNA, 40 bp, Homo sapiens
taattgtcctaaaagaatcacagttatgccaaataaaaaa

SEQ ID NO: 90678 - DNA, 40 bp, Homo sapiens
tttttatttggcataactgtgattcttttaggacaattac

SEQ ID NO: 90679 - DNA, 40 bp, Homo sapiens
gtaattgtcctaaaagaatcacagttatgccaaataaaaa

SEQ ID NO: 90680 - DNA, 40 bp, Homo sapiens
ttttatttggcataactgtgattcttttaggacaattact

SEQ ID NO: 90681 - DNA, 40 bp, Homo sapiens
agtaattgtcctaaaagaatcacagttatgccaaataaaa

SEQ ID NO: 90682 - DNA, 40 bp, Homo sapiens
tttatttggcataactgtgattcttttaggacaattactg

SEQ ID NO: 90683 - DNA, 40 bp, Homo sapiens
cagtaattgtcctaaaagaatcacagttatgccaaataaa

SEQ ID NO: 90684 - DNA, 40 bp, Homo sapiens
ttatttggcataactgtgattcttttaggacaattactgt

SEQ ID NO: 90685 - DNA, 40 bp, Homo sapiens
acagtaattgtcctaaaagaatcacagttatgccaaataa

SEQ ID NO: 90686 - DNA, 40 bp, Homo sapiens
tatttggcataactgtgattcttttaggacaattactgta

SEQ ID NO: 90687 - DNA, 40 bp, Homo sapiens
tacagtaattgtcctaaaagaatcacagttatgccaaata

SEQ ID NO: 90688 - DNA, 40 bp, Homo sapiens
atttggcataactgtgattcttttaggacaattactgtac

SEQ ID NO: 90689 - DNA, 40 bp, Homo sapiens
gtacagtaattgtcctaaaagaatcacagttatgccaaat

SEQ ID NO: 90690 - DNA, 40 bp, Homo sapiens
tttggcataactgtgattcttttaggacaattactgtaca

SEQ ID NO: 90691 - DNA, 40 bp, Homo sapiens
tgtacagtaattgtcctaaaagaatcacagttatgccaaa

SEQ ID NO: 90692 - DNA, 40 bp, Homo sapiens
ttggcataactgtgattcttttaggacaattactgtacac

SEQ ID NO: 90693 - DNA, 40 bp, Homo sapiens
gtgtacagtaattgtcctaaaagaatcacagttatgccaa

SEQ ID NO: 90694 - DNA, 40 bp, Homo sapiens
tggcataactgtgattcttttaggacaattactgtacaca

SEQ ID NO: 90695 - DNA, 40 bp, Homo sapiens
tgtgtacagtaattgtcctaaaagaatcacagttatgcca

SEQ ID NO: 90696 - DNA, 40 bp, Homo sapiens
ggcataactgtgattcttttaggacaattactgtacacat

SEQ ID NO: 90697 - DNA, 40 bp, Homo sapiens
atgtgtacagtaattgtcctaaaagaatcacagttatgcc

SEQ ID NO: 90698 - DNA, 40 bp, Homo sapiens
gcataactgtgattcttttaggacaattactgtacacatt

SEQ ID NO: 90699 - DNA, 40 bp, Homo sapiens
aatgtgtacagtaattgtcctaaaagaatcacagttatgc

SEQ ID NO: 90700 - DNA, 40 bp, Homo sapiens
cataactgtgattcttttaggacaattactgtacacatta

SEQ ID NO: 90701 - DNA, 40 bp, Homo sapiens
taatgtgtacagtaattgtcctaaaagaatcacagttatg

SEQ ID NO: 90702 - DNA, 40 bp, Homo sapiens
ataactgtgattcttttaggacaattactgtacacattaa

SEQ ID NO: 90703 - DNA, 40 bp, Homo sapiens
ttaatgtgtacagtaattgtcctaaaagaatcacagttat

SEQ ID NO: 90704 - DNA, 40 bp, Homo sapiens
taactgtgattcttttaggacaattactgtacacattaag

SEQ ID NO: 90705 - DNA, 40 bp, Homo sapiens
cttaatgtgtacagtaattgtcctaaaagaatcacagtta

SEQ ID NO: 90706 - DNA, 40 bp, Homo sapiens
aactgtgattcttttaggacaattactgtacacattaagg

SEQ ID NO: 90707 - DNA, 40 bp, Homo sapiens
ccttaatgtgtacagtaattgtcctaaaagaatcacagtt

SEQ ID NO: 90708 - DNA, 40 bp, Homo sapiens
actgtgattcttttaggacaattactgtacacattaaggt

SEQ ID NO: 90709 - DNA, 40 bp, Homo sapiens
accttaatgtgtacagtaattgtcctaaaagaatcacagt

SEQ ID NO: 90710 - DNA, 40 bp, Homo sapiens
ctgtgattcttttaggacaattactgtacacattaaggtg

SEQ ID NO: 90711 - DNA, 40 bp, Homo sapiens
caccttaatgtgtacagtaattgtcctaaaagaatcacag

SEQ ID NO: 90712 - DNA, 40 bp, Homo sapiens
tgtgattcttttaggacaattactgtacacattaaggtgt

SEQ ID NO: 90713 - DNA, 40 bp, Homo sapiens
acaccttaatgtgtacagtaattgtcctaaaagaatcaca

SEQ ID NO: 90714 - DNA, 40 bp, Homo sapiens
gtgattcttttaggacaattactgtacacattaaggtgta

SEQ ID NO: 90715 - DNA, 40 bp, Homo sapiens
tacaccttaatgtgtacagtaattgtcctaaaagaatcac

SEQ ID NO: 90716 - DNA, 40 bp, Homo sapiens
tgattcttttaggacaattactgtacacattaaggtgtat

SEQ ID NO: 90717 - DNA, 40 bp, Homo sapiens
atacaccttaatgtgtacagtaattgtcctaaaagaatca

SEQ ID NO: 90718 - DNA, 40 bp, Homo sapiens
gattcttttaggacaattactgtacacattaaggtgtatg

SEQ ID NO: 90719 - DNA, 40 bp, Homo sapiens
catacaccttaatgtgtacagtaattgtcctaaaagaatc

SEQ ID NO: 90720 - DNA, 40 bp, Homo sapiens
attcttttaggacaattactgtacacattaaggtgtatgt

SEQ ID NO: 90721 - DNA, 40 bp, Homo sapiens
acatacaccttaatgtgtacagtaattgtcctaaaagaat

SEQ ID NO: 90722 - DNA, 40 bp, Homo sapiens
ttcttttaggacaattactgtacacattaaggtgtatgtc

SEQ ID NO: 90723 - DNA, 40 bp, Homo sapiens
gacatacaccttaatgtgtacagtaattgtcctaaaagaa

SEQ ID NO: 90724 - DNA, 40 bp, Homo sapiens
tcttttaggacaattactgtacacattaaggtgtatgtca

SEQ ID NO: 90725 - DNA, 40 bp, Homo sapiens
tgacatacaccttaatgtgtacagtaattgtcctaaaaga

SEQ ID NO: 90726 - DNA, 40 bp, Homo sapiens
cttttaggacaattactgtacacattaaggtgtatgtcag

SEQ ID NO: 90727 - DNA, 40 bp, Homo sapiens
ctgacatacaccttaatgtgtacagtaattgtcctaaaag

SEQ ID NO: 90728 - DNA, 40 bp, Homo sapiens
ttttaggacaattactgtacacattaaggtgtatgtcaga

SEQ ID NO: 90729 - DNA, 40 bp, Homo sapiens
tctgacatacaccttaatgtgtacagtaattgtcctaaaa

SEQ ID NO: 90730 - DNA, 40 bp, Homo sapiens
tttaggacaattactgtacacattaaggtgtatgtcagat

SEQ ID NO: 90731 - DNA, 40 bp, Homo sapiens
atctgacatacaccttaatgtgtacagtaattgtcctaaa

SEQ ID NO: 90732 - DNA, 40 bp, Homo sapiens
ttaggacaattactgtacacattaaggtgtatgtcagata

SEQ ID NO: 90733 - DNA, 40 bp, Homo sapiens
tatctgacatacaccttaatgtgtacagtaattgtcctaa

SEQ ID NO: 90734 - DNA, 40 bp, Homo sapiens
taggacaattactgtacacattaaggtgtatgtcagatat

SEQ ID NO: 90735 - DNA, 40 bp, Homo sapiens
atatctgacatacaccttaatgtgtacagtaattgtccta

SEQ ID NO: 90736 - DNA, 40 bp, Homo sapiens
aggacaattactgtacacattaaggtgtatgtcagatatt

SEQ ID NO: 90737 - DNA, 40 bp, Homo sapiens
aatatctgacatacaccttaatgtgtacagtaattgtcct

SEQ ID NO: 90738 - DNA, 40 bp, Homo sapiens
ggacaattactgtacacattaaggtgtatgtcagatattc

SEQ ID NO: 90739 - DNA, 40 bp, Homo sapiens
gaatatctgacatacaccttaatgtgtacagtaattgtcc

SEQ ID NO: 90740 - DNA, 40 bp, Homo sapiens
gacaattactgtacacattaaggtgtatgtcagatattca

SEQ ID NO: 90741 - DNA, 40 bp, Homo sapiens
tgaatatctgacatacaccttaatgtgtacagtaattgtc

SEQ ID NO: 90742 - DNA, 40 bp, Homo sapiens
acaattactgtacacattaaggtgtatgtcagatattcat

SEQ ID NO: 90743 - DNA, 40 bp, Homo sapiens
atgaatatctgacatacaccttaatgtgtacagtaattgt

SEQ ID NO: 90744 - DNA, 40 bp, Homo sapiens
caattactgtacacattaaggtgtatgtcagatattcata

SEQ ID NO: 90745 - DNA, 40 bp, Homo sapiens
tatgaatatctgacatacaccttaatgtgtacagtaattg

SEQ ID NO: 90746 - DNA, 40 bp, Homo sapiens
aattactgtacacattaaggtgtatgtcagatattcatat

SEQ ID NO: 90747 - DNA, 40 bp, Homo sapiens
atatgaatatctgacatacaccttaatgtgtacagtaatt

SEQ ID NO: 90748 - DNA, 40 bp, Homo sapiens
attactgtacacattaaggtgtatgtcagatattcatatt

SEQ ID NO: 90749 - DNA, 40 bp, Homo sapiens
aatatgaatatctgacatacaccttaatgtgtacagtaat

SEQ ID NO: 90750 - DNA, 40 bp, Homo sapiens
ttactgtacacattaaggtgtatgtcagatattcatattg

SEQ ID NO: 90751 - DNA, 40 bp, Homo sapiens
caatatgaatatctgacatacaccttaatgtgtacagtaa

SEQ ID NO: 90752 - DNA, 40 bp, Homo sapiens
tactgtacacattaaggtgtatgtcagatattcatattga

SEQ ID NO: 90753 - DNA, 40 bp, Homo sapiens
tcaatatgaatatctgacatacaccttaatgtgtacagta

SEQ ID NO: 90754 - DNA, 40 bp, Homo sapiens
actgtacacattaaggtgtatgtcagatattcatattgac

SEQ ID NO: 90755 - DNA, 40 bp, Homo sapiens
gtcaatatgaatatctgacatacaccttaatgtgtacagt

SEQ ID NO: 90756 - DNA, 40 bp, Homo sapiens
ctgtacacattaaggtgtatgtcagatattcatattgacc

SEQ ID NO: 90757 - DNA, 40 bp, Homo sapiens
ggtcaatatgaatatctgacatacaccttaatgtgtacag

SEQ ID NO: 90758 - DNA, 40 bp, Homo sapiens
tgtacacattaaggtgtatgtcagatattcatattgaccc

SEQ ID NO: 90759 - DNA, 40 bp, Homo sapiens
gggtcaatatgaatatctgacatacaccttaatgtgtaca

SEQ ID NO: 90760 - DNA, 40 bp, Homo sapiens
gtacacattaaggtgtatgtcagatattcatattgaccca

SEQ ID NO: 90761 - DNA, 40 bp, Homo sapiens
tgggtcaatatgaatatctgacatacaccttaatgtgtac

SEQ ID NO: 90762 - DNA, 40 bp, Homo sapiens
tacacattaaggtgtatgtcagatattcatattgacccaa

SEQ ID NO: 90763 - DNA, 40 bp, Homo sapiens
ttgggtcaatatgaatatctgacatacaccttaatgtgta

SEQ ID NO: 90764 - DNA, 40 bp, Homo sapiens
acacattaaggtgtatgtcagatattcatattgacccaaa

SEQ ID NO: 90765 - DNA, 40 bp, Homo sapiens
tttgggtcaatatgaatatctgacatacaccttaatgtgt

SEQ ID NO: 90766 - DNA, 40 bp, Homo sapiens
cacattaaggtgtatgtcagatattcatattgacccaaat

SEQ ID NO: 90767 - DNA, 40 bp, Homo sapiens
atttgggtcaatatgaatatctgacatacaccttaatgtg

SEQ ID NO: 90768 - DNA, 40 bp, Homo sapiens
acattaaggtgtatgtcagatattcatattgacccaaatg

SEQ ID NO: 90769 - DNA, 40 bp, Homo sapiens
catttgggtcaatatgaatatctgacatacaccttaatgt

SEQ ID NO: 90770 - DNA, 40 bp, Homo sapiens
cattaaggtgtatgtcagatattcatattgacccaaatgt

SEQ ID NO: 90771 - DNA, 40 bp, Homo sapiens
acatttgggtcaatatgaatatctgacatacaccttaatg

SEQ ID NO: 90772 - DNA, 40 bp, Homo sapiens
attaaggtgtatgtcagatattcatattgacccaaatgtg

SEQ ID NO: 90773 - DNA, 40 bp, Homo sapiens
cacatttgggtcaatatgaatatctgacatacaccttaat

SEQ ID NO: 90774 - DNA, 40 bp, Homo sapiens
ttaaggtgtatgtcagatattcatattgacccaaatgtgt

SEQ ID NO: 90775 - DNA, 40 bp, Homo sapiens
acacatttgggtcaatatgaatatctgacatacaccttaa

SEQ ID NO: 90776 - DNA, 40 bp, Homo sapiens
taaggtgtatgtcagatattcatattgacccaaatgtgta

SEQ ID NO: 90777 - DNA, 40 bp, Homo sapiens
tacacatttgggtcaatatgaatatctgacatacacctta

SEQ ID NO: 90778 - DNA, 40 bp, Homo sapiens
aaggtgtatgtcagatattcatattgacccaaatgtgtaa

SEQ ID NO: 90779 - DNA, 40 bp, Homo sapiens
ttacacatttgggtcaatatgaatatctgacatacacctt

SEQ ID NO: 90780 - DNA, 40 bp, Homo sapiens
aggtgtatgtcagatattcatattgacccaaatgtgtaat

SEQ ID NO: 90781 - DNA, 40 bp, Homo sapiens
attacacatttgggtcaatatgaatatctgacatacacct

SEQ ID NO: 90782 - DNA, 40 bp, Homo sapiens
ggtgtatgtcagatattcatattgacccaaatgtgtaata

SEQ ID NO: 90783 - DNA, 40 bp, Homo sapiens
tattacacatttgggtcaatatgaatatctgacatacacc

SEQ ID NO: 90784 - DNA, 40 bp, Homo sapiens
gtgtatgtcagatattcatattgacccaaatgtgtaatat

SEQ ID NO: 90785 - DNA, 40 bp, Homo sapiens
atattacacatttgggtcaatatgaatatctgacatacac

SEQ ID NO: 90786 - DNA, 40 bp, Homo sapiens
tgtatgtcagatattcatattgacccaaatgtgtaatatt

SEQ ID NO: 90787 - DNA, 40 bp, Homo sapiens
aatattacacatttgggtcaatatgaatatctgacataca

SEQ ID NO: 90788 - DNA, 40 bp, Homo sapiens
gtatgtcagatattcatattgacccaaatgtgtaatattc

SEQ ID NO: 90789 - DNA, 40 bp, Homo sapiens
gaatattacacatttgggtcaatatgaatatctgacatac

SEQ ID NO: 90790 - DNA, 40 bp, Homo sapiens
tatgtcagatattcatattgacccaaatgtgtaatattcc

SEQ ID NO: 90791 - DNA, 40 bp, Homo sapiens
ggaatattacacatttgggtcaatatgaatatctgacata

SEQ ID NO: 90792 - DNA, 40 bp, Homo sapiens
atgtcagatattcatattgacccaaatgtgtaatattcca

SEQ ID NO: 90793 - DNA, 40 bp, Homo sapiens
tggaatattacacatttgggtcaatatgaatatctgacat

SEQ ID NO: 90794 - DNA, 40 bp, Homo sapiens
tgtcagatattcatattgacccaaatgtgtaatattccag

SEQ ID NO: 90795 - DNA, 40 bp, Homo sapiens
ctggaatattacacatttgggtcaatatgaatatctgaca

SEQ ID NO: 90796 - DNA, 40 bp, Homo sapiens
gtcagatattcatattgacccaaatgtgtaatattccagt

SEQ ID NO: 90797 - DNA, 40 bp, Homo sapiens
actggaatattacacatttgggtcaatatgaatatctgac

SEQ ID NO: 90798 - DNA, 40 bp, Homo sapiens
tcagatattcatattgacccaaatgtgtaatattccagtt

SEQ ID NO: 90799 - DNA, 40 bp, Homo sapiens
aactggaatattacacatttgggtcaatatgaatatctga

SEQ ID NO: 90800 - DNA, 40 bp, Homo sapiens
cagatattcatattgacccaaatgtgtaatattccagttt

SEQ ID NO: 90801 - DNA, 40 bp, Homo sapiens
aaactggaatattacacatttgggtcaatatgaatatctg

SEQ ID NO: 90802 - DNA, 40 bp, Homo sapiens
agatattcatattgacccaaatgtgtaatattccagtttt

SEQ ID NO: 90803 - DNA, 40 bp, Homo sapiens
aaaactggaatattacacatttgggtcaatatgaatatct

SEQ ID NO: 90804 - DNA, 40 bp, Homo sapiens
gatattcatattgacccaaatgtgtaatattccagttttc

SEQ ID NO: 90805 - DNA, 40 bp, Homo sapiens
gaaaactggaatattacacatttgggtcaatatgaatatc

SEQ ID NO: 90806 - DNA, 40 bp, Homo sapiens
atattcatattgacccaaatgtgtaatattccagttttct

SEQ ID NO: 90807 - DNA, 40 bp, Homo sapiens
agaaaactggaatattacacatttgggtcaatatgaatat

SEQ ID NO: 90808 - DNA, 40 bp, Homo sapiens
tattcatattgacccaaatgtgtaatattccagttttctc

SEQ ID NO: 90809 - DNA, 40 bp, Homo sapiens
gagaaaactggaatattacacatttgggtcaatatgaata

SEQ ID NO: 90810 - DNA, 40 bp, Homo sapiens
attcatattgacccaaatgtgtaatattccagttttctct

SEQ ID NO: 90811 - DNA, 40 bp, Homo sapiens
agagaaaactggaatattacacatttgggtcaatatgaat

SEQ ID NO: 90812 - DNA, 40 bp, Homo sapiens
ttcatattgacccaaatgtgtaatattccagttttctctg

SEQ ID NO: 90813 - DNA, 40 bp, Homo sapiens
cagagaaaactggaatattacacatttgggtcaatatgaa

SEQ ID NO: 90814 - DNA, 40 bp, Homo sapiens
tcatattgacccaaatgtgtaatattccagttttctctgc

SEQ ID NO: 90815 - DNA, 40 bp, Homo sapiens
gcagagaaaactggaatattacacatttgggtcaatatga

SEQ ID NO: 90816 - DNA, 40 bp, Homo sapiens
catattgacccaaatgtgtaatattccagttttctctgca

SEQ ID NO: 90817 - DNA, 40 bp, Homo sapiens
tgcagagaaaactggaatattacacatttgggtcaatatg

SEQ ID NO: 90818 - DNA, 40 bp, Homo sapiens
atattgacccaaatgtgtaatattccagttttctctgcat

SEQ ID NO: 90819 - DNA, 40 bp, Homo sapiens
atgcagagaaaactggaatattacacatttgggtcaatat

SEQ ID NO: 90820 - DNA, 40 bp, Homo sapiens
tattgacccaaatgtgtaatattccagttttctctgcata

SEQ ID NO: 90821 - DNA, 40 bp, Homo sapiens
tatgcagagaaaactggaatattacacatttgggtcaata

SEQ ID NO: 90822 - DNA, 40 bp, Homo sapiens
attgacccaaatgtgtaatattccagttttctctgcataa

SEQ ID NO: 90823 - DNA, 40 bp, Homo sapiens
ttatgcagagaaaactggaatattacacatttgggtcaat

SEQ ID NO: 90824 - DNA, 40 bp, Homo sapiens
ttgacccaaatgtgtaatattccagttttctctgcataag

SEQ ID NO: 90825 - DNA, 40 bp, Homo sapiens
cttatgcagagaaaactggaatattacacatttgggtcaa

SEQ ID NO: 90826 - DNA, 40 bp, Homo sapiens
tgacccaaatgtgtaatattccagttttctctgcataagt

SEQ ID NO: 90827 - DNA, 40 bp, Homo sapiens
acttatgcagagaaaactggaatattacacatttgggtca

SEQ ID NO: 90828 - DNA, 40 bp, Homo sapiens
gacccaaatgtgtaatattccagttttctctgcataagta

SEQ ID NO: 90829 - DNA, 40 bp, Homo sapiens
tacttatgcagagaaaactggaatattacacatttgggtc

SEQ ID NO: 90830 - DNA, 40 bp, Homo sapiens
acccaaatgtgtaatattccagttttctctgcataagtaa

SEQ ID NO: 90831 - DNA, 40 bp, Homo sapiens
ttacttatgcagagaaaactggaatattacacatttgggt

SEQ ID NO: 90832 - DNA, 40 bp, Homo sapiens
cccaaatgtgtaatattccagttttctctgcataagtaat

SEQ ID NO: 90833 - DNA, 40 bp, Homo sapiens
attacttatgcagagaaaactggaatattacacatttggg

SEQ ID NO: 90834 - DNA, 40 bp, Homo sapiens
ccaaatgtgtaatattccagttttctctgcataagtaatt

SEQ ID NO: 90835 - DNA, 40 bp, Homo sapiens
aattacttatgcagagaaaactggaatattacacatttgg

SEQ ID NO: 90836 - DNA, 40 bp, Homo sapiens
caaatgtgtaatattccagttttctctgcataagtaatta

SEQ ID NO: 90837 - DNA, 40 bp, Homo sapiens
taattacttatgcagagaaaactggaatattacacatttg

SEQ ID NO: 90838 - DNA, 40 bp, Homo sapiens
aaatgtgtaatattccagttttctctgcataagtaattaa

SEQ ID NO: 90839 - DNA, 40 bp, Homo sapiens
ttaattacttatgcagagaaaactggaatattacacattt

SEQ ID NO: 90840 - DNA, 40 bp, Homo sapiens
aatgtgtaatattccagttttctctgcataagtaattaaa

SEQ ID NO: 90841 - DNA, 40 bp, Homo sapiens
tttaattacttatgcagagaaaactggaatattacacatt

SEQ ID NO: 90842 - DNA, 40 bp, Homo sapiens
atgtgtaatattccagttttctctgcataagtaattaaaa

SEQ ID NO: 90843 - DNA, 40 bp, Homo sapiens
ttttaattacttatgcagagaaaactggaatattacacat

SEQ ID NO: 90844 - DNA, 40 bp, Homo sapiens
tgtgtaatattccagttttctctgcataagtaattaaaat

SEQ ID NO: 90845 - DNA, 40 bp, Homo sapiens
attttaattacttatgcagagaaaactggaatattacaca

SEQ ID NO: 90846 - DNA, 40 bp, Homo sapiens
gtgtaatattccagttttctctgcataagtaattaaaata

SEQ ID NO: 90847 - DNA, 40 bp, Homo sapiens
tattttaattacttatgcagagaaaactggaatattacac

SEQ ID NO: 90848 - DNA, 40 bp, Homo sapiens
tgtaatattccagttttctctgcataagtaattaaaatat

SEQ ID NO: 90849 - DNA, 40 bp, Homo sapiens
atattttaattacttatgcagagaaaactggaatattaca

SEQ ID NO: 90850 - DNA, 40 bp, Homo sapiens
gtaatattccagttttctctgcataagtaattaaaatata

SEQ ID NO: 90851 - DNA, 40 bp, Homo sapiens
tatattttaattacttatgcagagaaaactggaatattac

SEQ ID NO: 90852 - DNA, 40 bp, Homo sapiens
taatattccagttttctctgcataagtaattaaaatatac

SEQ ID NO: 90853 - DNA, 40 bp, Homo sapiens
gtatattttaattacttatgcagagaaaactggaatatta

SEQ ID NO: 90854 - DNA, 40 bp, Homo sapiens
aatattccagttttctctgcataagtaattaaaatatact

SEQ ID NO: 90855 - DNA, 40 bp, Homo sapiens
agtatattttaattacttatgcagagaaaactggaatatt

SEQ ID NO: 90856 - DNA, 40 bp, Homo sapiens
atattccagttttctctgcataagtaattaaaatatactt

SEQ ID NO: 90857 - DNA, 40 bp, Homo sapiens
aagtatattttaattacttatgcagagaaaactggaatat

SEQ ID NO: 90858 - DNA, 40 bp, Homo sapiens
tattccagttttctctgcataagtaattaaaatatactta

SEQ ID NO: 90859 - DNA, 40 bp, Homo sapiens
taagtatattttaattacttatgcagagaaaactggaata

SEQ ID NO: 90860 - DNA, 40 bp, Homo sapiens
attccagttttctctgcataagtaattaaaatatacttaa

SEQ ID NO: 90861 - DNA, 40 bp, Homo sapiens
ttaagtatattttaattacttatgcagagaaaactggaat

SEQ ID NO: 90862 - DNA, 40 bp, Homo sapiens
ttccagttttctctgcataagtaattaaaatatacttaaa

SEQ ID NO: 90863 - DNA, 40 bp, Homo sapiens
tttaagtatattttaattacttatgcagagaaaactggaa

SEQ ID NO: 90864 - DNA, 40 bp, Homo sapiens
tccagttttctctgcataagtaattaaaatatacttaaaa

SEQ ID NO: 90865 - DNA, 40 bp, Homo sapiens
ttttaagtatattttaattacttatgcagagaaaactgga

SEQ ID NO: 90866 - DNA, 40 bp, Homo sapiens
ccagttttctctgcataagtaattaaaatatacttaaaaa

SEQ ID NO: 90867 - DNA, 40 bp, Homo sapiens
tttttaagtatattttaattacttatgcagagaaaactgg

SEQ ID NO: 90868 - DNA, 40 bp, Homo sapiens
cagttttctctgcataagtaattaaaatatacttaaaaat

SEQ ID NO: 90869 - DNA, 40 bp, Homo sapiens
atttttaagtatattttaattacttatgcagagaaaactg

SEQ ID NO: 90870 - DNA, 40 bp, Homo sapiens
agttttctctgcataagtaattaaaatatacttaaaaatt

SEQ ID NO: 90871 - DNA, 40 bp, Homo sapiens
aatttttaagtatattttaattacttatgcagagaaaact

SEQ ID NO: 90872 - DNA, 40 bp, Homo sapiens
gttttctctgcataagtaattaaaatatacttaaaaatta

SEQ ID NO: 90873 - DNA, 40 bp, Homo sapiens
taatttttaagtatattttaattacttatgcagagaaaac

SEQ ID NO: 90874 - DNA, 40 bp, Homo sapiens
ttttctctgcataagtaattaaaatatacttaaaaattaa

SEQ ID NO: 90875 - DNA, 40 bp, Homo sapiens
ttaatttttaagtatattttaattacttatgcagagaaaa

SEQ ID NO: 90876 - DNA, 40 bp, Homo sapiens
tttctctgcataagtaattaaaatatacttaaaaattaat

SEQ ID NO: 90877 - DNA, 40 bp, Homo sapiens
attaatttttaagtatattttaattacttatgcagagaaa

SEQ ID NO: 90878 - DNA, 40 bp, Homo sapiens
ttctctgcataagtaattaaaatatacttaaaaattaata

SEQ ID NO: 90879 - DNA, 40 bp, Homo sapiens
tattaatttttaagtatattttaattacttatgcagagaa

SEQ ID NO: 90880 - DNA, 40 bp, Homo sapiens
tctctgcataagtaattaaaatatacttaaaaattaatag

SEQ ID NO: 90881 - DNA, 40 bp, Homo sapiens
ctattaatttttaagtatattttaattacttatgcagaga

SEQ ID NO: 90882 - DNA, 40 bp, Homo sapiens
ctctgcataagtaattaaaatatacttaaaaattaatagt

SEQ ID NO: 90883 - DNA, 40 bp, Homo sapiens
actattaatttttaagtatattttaattacttatgcagag

SEQ ID NO: 90884 - DNA, 40 bp, Homo sapiens
tctgcataagtaattaaaatatacttaaaaattaatagtt

SEQ ID NO: 90885 - DNA, 40 bp, Homo sapiens
aactattaatttttaagtatattttaattacttatgcaga

SEQ ID NO: 90886 - DNA, 40 bp, Homo sapiens
ctgcataagtaattaaaatatacttaaaaattaatagttt

SEQ ID NO: 90887 - DNA, 40 bp, Homo sapiens
aaactattaatttttaagtatattttaattacttatgcag

SEQ ID NO: 90888 - DNA, 40 bp, Homo sapiens
tgcataagtaattaaaatatacttaaaaattaatagtttt

SEQ ID NO: 90889 - DNA, 40 bp, Homo sapiens
aaaactattaatttttaagtatattttaattacttatgca

SEQ ID NO: 90890 - DNA, 40 bp, Homo sapiens
gcataagtaattaaaatatacttaaaaattaatagtttta

SEQ ID NO: 90891 - DNA, 40 bp, Homo sapiens
taaaactattaatttttaagtatattttaattacttatgc

SEQ ID NO: 90892 - DNA, 40 bp, Homo sapiens
cataagtaattaaaatatacttaaaaattaatagttttat

SEQ ID NO: 90893 - DNA, 40 bp, Homo sapiens
ataaaactattaatttttaagtatattttaattacttatg

SEQ ID NO: 90894 - DNA, 40 bp, Homo sapiens
ataagtaattaaaatatacttaaaaattaatagttttatc

SEQ ID NO: 90895 - DNA, 40 bp, Homo sapiens
gataaaactattaatttttaagtatattttaattacttat

SEQ ID NO: 90896 - DNA, 40 bp, Homo sapiens
taagtaattaaaatatacttaaaaattaatagttttatct

SEQ ID NO: 90897 - DNA, 40 bp, Homo sapiens
agataaaactattaatttttaagtatattttaattactta

SEQ ID NO: 90898 - DNA, 40 bp, Homo sapiens
aagtaattaaaatatacttaaaaattaatagttttatctg

SEQ ID NO: 90899 - DNA, 40 bp, Homo sapiens
cagataaaactattaatttttaagtatattttaattactt

SEQ ID NO: 90900 - DNA, 40 bp, Homo sapiens
agtaattaaaatatacttaaaaattaatagttttatctgg

SEQ ID NO: 90901 - DNA, 40 bp, Homo sapiens
ccagataaaactattaatttttaagtatattttaattact

SEQ ID NO: 90902 - DNA, 40 bp, Homo sapiens
gtaattaaaatatacttaaaaattaatagttttatctggg

SEQ ID NO: 90903 - DNA, 40 bp, Homo sapiens
cccagataaaactattaatttttaagtatattttaattac

SEQ ID NO: 90904 - DNA, 40 bp, Homo sapiens
taattaaaatatacttaaaaattaatagttttatctgggt

SEQ ID NO: 90905 - DNA, 40 bp, Homo sapiens
acccagataaaactattaatttttaagtatattttaatta

SEQ ID NO: 90906 - DNA, 40 bp, Homo sapiens
aattaaaatatacttaaaaattaatagttttatctgggta

SEQ ID NO: 90907 - DNA, 40 bp, Homo sapiens
tacccagataaaactattaatttttaagtatattttaatt

SEQ ID NO: 90908 - DNA, 40 bp, Homo sapiens
attaaaatatacttaaaaattaatagttttatctgggtac

SEQ ID NO: 90909 - DNA, 40 bp, Homo sapiens
gtacccagataaaactattaatttttaagtatattttaat

SEQ ID NO: 90910 - DNA, 40 bp, Homo sapiens
ttaaaatatacttaaaaattaatagttttatctgggtaca

SEQ ID NO: 90911 - DNA, 40 bp, Homo sapiens
tgtacccagataaaactattaatttttaagtatattttaa

SEQ ID NO: 90912 - DNA, 40 bp, Homo sapiens
taaaatatacttaaaaattaatagttttatctgggtacaa

SEQ ID NO: 90913 - DNA, 40 bp, Homo sapiens
ttgtacccagataaaactattaatttttaagtatatttta

SEQ ID NO: 90914 - DNA, 40 bp, Homo sapiens
aaaatatacttaaaaattaatagttttatctgggtacaaa

SEQ ID NO: 90915 - DNA, 40 bp, Homo sapiens
tttgtacccagataaaactattaatttttaagtatatttt

SEQ ID NO: 90916 - DNA, 40 bp, Homo sapiens
aaatatacttaaaaattaatagttttatctgggtacaaat

SEQ ID NO: 90917 - DNA, 40 bp, Homo sapiens
atttgtacccagataaaactattaatttttaagtatattt

SEQ ID NO: 90918 - DNA, 40 bp, Homo sapiens
aatatacttaaaaattaatagttttatctgggtacaaata

SEQ ID NO: 90919 - DNA, 40 bp, Homo sapiens
tatttgtacccagataaaactattaatttttaagtatatt

SEQ ID NO: 90920 - DNA, 40 bp, Homo sapiens
atatacttaaaaattaatagttttatctgggtacaaataa

SEQ ID NO: 90921 - DNA, 40 bp, Homo sapiens
ttatttgtacccagataaaactattaatttttaagtatat

SEQ ID NO: 90922 - DNA, 40 bp, Homo sapiens
tatacttaaaaattaatagttttatctgggtacaaataaa

SEQ ID NO: 90923 - DNA, 40 bp, Homo sapiens
tttatttgtacccagataaaactattaatttttaagtata

SEQ ID NO: 90924 - DNA, 40 bp, Homo sapiens
atacttaaaaattaatagttttatctgggtacaaataaac

SEQ ID NO: 90925 - DNA, 40 bp, Homo sapiens
gtttatttgtacccagataaaactattaatttttaagtat

SEQ ID NO: 90926 - DNA, 40 bp, Homo sapiens
tacttaaaaattaatagttttatctgggtacaaataaaca

SEQ ID NO: 90927 - DNA, 40 bp, Homo sapiens
tgtttatttgtacccagataaaactattaatttttaagta

SEQ ID NO: 90928 - DNA, 40 bp, Homo sapiens
acttaaaaattaatagttttatctgggtacaaataaacag

SEQ ID NO: 90929 - DNA, 40 bp, Homo sapiens
ctgtttatttgtacccagataaaactattaatttttaagt

SEQ ID NO: 90930 - DNA, 40 bp, Homo sapiens
cttaaaaattaatagttttatctgggtacaaataaacagg

SEQ ID NO: 90931 - DNA, 40 bp, Homo sapiens
cctgtttatttgtacccagataaaactattaatttttaag

SEQ ID NO: 90932 - DNA, 40 bp, Homo sapiens
ttaaaaattaatagttttatctgggtacaaataaacaggt

SEQ ID NO: 90933 - DNA, 40 bp, Homo sapiens
acctgtttatttgtacccagataaaactattaatttttaa

SEQ ID NO: 90934 - DNA, 40 bp, Homo sapiens
taaaaattaatagttttatctgggtacaaataaacaggtg

SEQ ID NO: 90935 - DNA, 40 bp, Homo sapiens
cacctgtttatttgtacccagataaaactattaattttta

SEQ ID NO: 90936 - DNA, 40 bp, Homo sapiens
aaaaattaatagttttatctgggtacaaataaacaggtgc

SEQ ID NO: 90937 - DNA, 40 bp, Homo sapiens
gcacctgtttatttgtacccagataaaactattaattttt

SEQ ID NO: 90938 - DNA, 40 bp, Homo sapiens
aaaattaatagttttatctgggtacaaataaacaggtgcc

SEQ ID NO: 90939 - DNA, 40 bp, Homo sapiens
ggcacctgtttatttgtacccagataaaactattaatttt

SEQ ID NO: 90940 - DNA, 40 bp, Homo sapiens
aaattaatagttttatctgggtacaaataaacaggtgcct

SEQ ID NO: 90941 - DNA, 40 bp, Homo sapiens
aggcacctgtttatttgtacccagataaaactattaattt

SEQ ID NO: 90942 - DNA, 40 bp, Homo sapiens
aattaatagttttatctgggtacaaataaacaggtgcctg

SEQ ID NO: 90943 - DNA, 40 bp, Homo sapiens
caggcacctgtttatttgtacccagataaaactattaatt

SEQ ID NO: 90944 - DNA, 40 bp, Homo sapiens
attaatagttttatctgggtacaaataaacaggtgcctga

SEQ ID NO: 90945 - DNA, 40 bp, Homo sapiens
tcaggcacctgtttatttgtacccagataaaactattaat

SEQ ID NO: 90946 - DNA, 40 bp, Homo sapiens
ttaatagttttatctgggtacaaataaacaggtgcctgaa

SEQ ID NO: 90947 - DNA, 40 bp, Homo sapiens
ttcaggcacctgtttatttgtacccagataaaactattaa

SEQ ID NO: 90948 - DNA, 40 bp, Homo sapiens
taatagttttatctgggtacaaataaacaggtgcctgaac

SEQ ID NO: 90949 - DNA, 40 bp, Homo sapiens
gttcaggcacctgtttatttgtacccagataaaactatta

SEQ ID NO: 90950 - DNA, 40 bp, Homo sapiens
aatagttttatctgggtacaaataaacaggtgcctgaact

SEQ ID NO: 90951 - DNA, 40 bp, Homo sapiens
agttcaggcacctgtttatttgtacccagataaaactatt

SEQ ID NO: 90952 - DNA, 40 bp, Homo sapiens
atagttttatctgggtacaaataaacaggtgcctgaacta

SEQ ID NO: 90953 - DNA, 40 bp, Homo sapiens
tagttcaggcacctgtttatttgtacccagataaaactat

SEQ ID NO: 90954 - DNA, 40 bp, Homo sapiens
tagttttatctgggtacaaataaacaggtgcctgaactag

SEQ ID NO: 90955 - DNA, 40 bp, Homo sapiens
ctagttcaggcacctgtttatttgtacccagataaaacta

SEQ ID NO: 90956 - DNA, 40 bp, Homo sapiens
agttttatctgggtacaaataaacaggtgcctgaactagt

SEQ ID NO: 90957 - DNA, 40 bp, Homo sapiens
actagttcaggcacctgtttatttgtacccagataaaact

SEQ ID NO: 90958 - DNA, 40 bp, Homo sapiens
gttttatctgggtacaaataaacaggtgcctgaactagtt

SEQ ID NO: 90959 - DNA, 40 bp, Homo sapiens
aactagttcaggcacctgtttatttgtacccagataaaac

SEQ ID NO: 90960 - DNA, 40 bp, Homo sapiens
ttttatctgggtacaaataaacaggtgcctgaactagttc

SEQ ID NO: 90961 - DNA, 40 bp, Homo sapiens
gaactagttcaggcacctgtttatttgtacccagataaaa

SEQ ID NO: 90962 - DNA, 40 bp, Homo sapiens
tttatctgggtacaaataaacaggtgcctgaactagttca

SEQ ID NO: 90963 - DNA, 40 bp, Homo sapiens
tgaactagttcaggcacctgtttatttgtacccagataaa

SEQ ID NO: 90964 - DNA, 40 bp, Homo sapiens
ttatctgggtacaaataaacaggtgcctgaactagttcac

SEQ ID NO: 90965 - DNA, 40 bp, Homo sapiens
gtgaactagttcaggcacctgtttatttgtacccagataa

SEQ ID NO: 90966 - DNA, 40 bp, Homo sapiens
tatctgggtacaaataaacaggtgcctgaactagttcaca

SEQ ID NO: 90967 - DNA, 40 bp, Homo sapiens
tgtgaactagttcaggcacctgtttatttgtacccagata

SEQ ID NO: 90968 - DNA, 40 bp, Homo sapiens
atctgggtacaaataaacaggtgcctgaactagttcacag

SEQ ID NO: 90969 - DNA, 40 bp, Homo sapiens
ctgtgaactagttcaggcacctgtttatttgtacccagat

SEQ ID NO: 90970 - DNA, 40 bp, Homo sapiens
tctgggtacaaataaacaggtgcctgaactagttcacaga

SEQ ID NO: 90971 - DNA, 40 bp, Homo sapiens
tctgtgaactagttcaggcacctgtttatttgtacccaga

SEQ ID NO: 90972 - DNA, 40 bp, Homo sapiens
ctgggtacaaataaacaggtgcctgaactagttcacagac

SEQ ID NO: 90973 - DNA, 40 bp, Homo sapiens
gtctgtgaactagttcaggcacctgtttatttgtacccag

SEQ ID NO: 90974 - DNA, 40 bp, Homo sapiens
tgggtacaaataaacaggtgcctgaactagttcacagaca

SEQ ID NO: 90975 - DNA, 40 bp, Homo sapiens
tgtctgtgaactagttcaggcacctgtttatttgtaccca

SEQ ID NO: 90976 - DNA, 40 bp, Homo sapiens
gggtacaaataaacaggtgcctgaactagttcacagacaa

SEQ ID NO: 90977 - DNA, 40 bp, Homo sapiens
ttgtctgtgaactagttcaggcacctgtttatttgtaccc

SEQ ID NO: 90978 - DNA, 40 bp, Homo sapiens
ggtacaaataaacaggtgcctgaactagttcacagacaag

SEQ ID NO: 90979 - DNA, 40 bp, Homo sapiens
cttgtctgtgaactagttcaggcacctgtttatttgtacc

SEQ ID NO: 90980 - DNA, 40 bp, Homo sapiens
gtacaaataaacaggtgcctgaactagttcacagacaagg

SEQ ID NO: 90981 - DNA, 40 bp, Homo sapiens
ccttgtctgtgaactagttcaggcacctgtttatttgtac

SEQ ID NO: 90982 - DNA, 40 bp, Homo sapiens
tacaaataaacaggtgcctgaactagttcacagacaagga

SEQ ID NO: 90983 - DNA, 40 bp, Homo sapiens
tccttgtctgtgaactagttcaggcacctgtttatttgta

SEQ ID NO: 90984 - DNA, 40 bp, Homo sapiens
acaaataaacaggtgcctgaactagttcacagacaaggaa

SEQ ID NO: 90985 - DNA, 40 bp, Homo sapiens
ttccttgtctgtgaactagttcaggcacctgtttatttgt

SEQ ID NO: 90986 - DNA, 40 bp, Homo sapiens
caaataaacaggtgcctgaactagttcacagacaaggaaa

SEQ ID NO: 90987 - DNA, 40 bp, Homo sapiens
tttccttgtctgtgaactagttcaggcacctgtttatttg

SEQ ID NO: 90988 - DNA, 40 bp, Homo sapiens
aaataaacaggtgcctgaactagttcacagacaaggaaac

SEQ ID NO: 90989 - DNA, 40 bp, Homo sapiens
gtttccttgtctgtgaactagttcaggcacctgtttattt

SEQ ID NO: 90990 - DNA, 40 bp, Homo sapiens
aataaacaggtgcctgaactagttcacagacaaggaaact

SEQ ID NO: 90991 - DNA, 40 bp, Homo sapiens
agtttccttgtctgtgaactagttcaggcacctgtttatt

SEQ ID NO: 90992 - DNA, 40 bp, Homo sapiens
ataaacaggtgcctgaactagttcacagacaaggaaactt

SEQ ID NO: 90993 - DNA, 40 bp, Homo sapiens
aagtttccttgtctgtgaactagttcaggcacctgtttat

SEQ ID NO: 90994 - DNA, 40 bp, Homo sapiens
taaacaggtgcctgaactagttcacagacaaggaaacttc

SEQ ID NO: 90995 - DNA, 40 bp, Homo sapiens
gaagtttccttgtctgtgaactagttcaggcacctgttta

SEQ ID NO: 90996 - DNA, 40 bp, Homo sapiens
aaacaggtgcctgaactagttcacagacaaggaaacttct

SEQ ID NO: 90997 - DNA, 40 bp, Homo sapiens
agaagtttccttgtctgtgaactagttcaggcacctgttt

SEQ ID NO: 90998 - DNA, 40 bp, Homo sapiens
aacaggtgcctgaactagttcacagacaaggaaacttcta

SEQ ID NO: 90999 - DNA, 40 bp, Homo sapiens
tagaagtttccttgtctgtgaactagttcaggcacctgtt

SEQ ID NO: 91000 - DNA, 40 bp, Homo sapiens
acaggtgcctgaactagttcacagacaaggaaacttctat

SEQ ID NO: 91001 - DNA, 40 bp, Homo sapiens
atagaagtttccttgtctgtgaactagttcaggcacctgt

SEQ ID NO: 91002 - DNA, 40 bp, Homo sapiens
caggtgcctgaactagttcacagacaaggaaacttctatg

SEQ ID NO: 91003 - DNA, 40 bp, Homo sapiens
catagaagtttccttgtctgtgaactagttcaggcacctg

SEQ ID NO: 91004 - DNA, 40 bp, Homo sapiens
aggtgcctgaactagttcacagacaaggaaacttctatgt

SEQ ID NO: 91005 - DNA, 40 bp, Homo sapiens
acatagaagtttccttgtctgtgaactagttcaggcacct

SEQ ID NO: 91006 - DNA, 40 bp, Homo sapiens
ggtgcctgaactagttcacagacaaggaaacttctatgta

SEQ ID NO: 91007 - DNA, 40 bp, Homo sapiens
tacatagaagtttccttgtctgtgaactagttcaggcacc

SEQ ID NO: 91008 - DNA, 40 bp, Homo sapiens
gtgcctgaactagttcacagacaaggaaacttctatgtaa

SEQ ID NO: 91009 - DNA, 40 bp, Homo sapiens
ttacatagaagtttccttgtctgtgaactagttcaggcac

SEQ ID NO: 91010 - DNA, 40 bp, Homo sapiens
tgcctgaactagttcacagacaaggaaacttctatgtaaa

SEQ ID NO: 91011 - DNA, 40 bp, Homo sapiens
tttacatagaagtttccttgtctgtgaactagttcaggca

SEQ ID NO: 91012 - DNA, 40 bp, Homo sapiens
gcctgaactagttcacagacaaggaaacttctatgtaaaa

SEQ ID NO: 91013 - DNA, 40 bp, Homo sapiens
ttttacatagaagtttccttgtctgtgaactagttcaggc

SEQ ID NO: 91014 - DNA, 40 bp, Homo sapiens
cctgaactagttcacagacaaggaaacttctatgtaaaaa

SEQ ID NO: 91015 - DNA, 40 bp, Homo sapiens
tttttacatagaagtttccttgtctgtgaactagttcagg

SEQ ID NO: 91016 - DNA, 40 bp, Homo sapiens
ctgaactagttcacagacaaggaaacttctatgtaaaaat

SEQ ID NO: 91017 - DNA, 40 bp, Homo sapiens
atttttacatagaagtttccttgtctgtgaactagttcag

SEQ ID NO: 91018 - DNA, 40 bp, Homo sapiens
tgaactagttcacagacaaggaaacttctatgtaaaaatc

SEQ ID NO: 91019 - DNA, 40 bp, Homo sapiens
gatttttacatagaagtttccttgtctgtgaactagttca

SEQ ID NO: 91020 - DNA, 40 bp, Homo sapiens
gaactagttcacagacaaggaaacttctatgtaaaaatca

SEQ ID NO: 91021 - DNA, 40 bp, Homo sapiens
tgatttttacatagaagtttccttgtctgtgaactagttc

SEQ ID NO: 91022 - DNA, 40 bp, Homo sapiens
aactagttcacagacaaggaaacttctatgtaaaaatcac

SEQ ID NO: 91023 - DNA, 40 bp, Homo sapiens
gtgatttttacatagaagtttccttgtctgtgaactagtt

SEQ ID NO: 91024 - DNA, 40 bp, Homo sapiens
actagttcacagacaaggaaacttctatgtaaaaatcact

SEQ ID NO: 91025 - DNA, 40 bp, Homo sapiens
agtgatttttacatagaagtttccttgtctgtgaactagt

SEQ ID NO: 91026 - DNA, 40 bp, Homo sapiens
ctagttcacagacaaggaaacttctatgtaaaaatcacta

SEQ ID NO: 91027 - DNA, 40 bp, Homo sapiens
tagtgatttttacatagaagtttccttgtctgtgaactag

SEQ ID NO: 91028 - DNA, 40 bp, Homo sapiens
tagttcacagacaaggaaacttctatgtaaaaatcactat

SEQ ID NO: 91029 - DNA, 40 bp, Homo sapiens
atagtgatttttacatagaagtttccttgtctgtgaacta

SEQ ID NO: 91030 - DNA, 40 bp, Homo sapiens
agttcacagacaaggaaacttctatgtaaaaatcactatg

SEQ ID NO: 91031 - DNA, 40 bp, Homo sapiens
catagtgatttttacatagaagtttccttgtctgtgaact

SEQ ID NO: 91032 - DNA, 40 bp, Homo sapiens
gttcacagacaaggaaacttctatgtaaaaatcactatga

SEQ ID NO: 91033 - DNA, 40 bp, Homo sapiens
tcatagtgatttttacatagaagtttccttgtctgtgaac

SEQ ID NO: 91034 - DNA, 40 bp, Homo sapiens
ttcacagacaaggaaacttctatgtaaaaatcactatgat

SEQ ID NO: 91035 - DNA, 40 bp, Homo sapiens
atcatagtgatttttacatagaagtttccttgtctgtgaa

SEQ ID NO: 91036 - DNA, 40 bp, Homo sapiens
tcacagacaaggaaacttctatgtaaaaatcactatgatt

SEQ ID NO: 91037 - DNA, 40 bp, Homo sapiens
aatcatagtgatttttacatagaagtttccttgtctgtga

SEQ ID NO: 91038 - DNA, 40 bp, Homo sapiens
cacagacaaggaaacttctatgtaaaaatcactatgattt

SEQ ID NO: 91039 - DNA, 40 bp, Homo sapiens
aaatcatagtgatttttacatagaagtttccttgtctgtg

SEQ ID NO: 91040 - DNA, 40 bp, Homo sapiens
acagacaaggaaacttctatgtaaaaatcactatgatttc

SEQ ID NO: 91041 - DNA, 40 bp, Homo sapiens
gaaatcatagtgatttttacatagaagtttccttgtctgt

SEQ ID NO: 91042 - DNA, 40 bp, Homo sapiens
cagacaaggaaacttctatgtaaaaatcactatgatttct

SEQ ID NO: 91043 - DNA, 40 bp, Homo sapiens
agaaatcatagtgatttttacatagaagtttccttgtctg

SEQ ID NO: 91044 - DNA, 40 bp, Homo sapiens
agacaaggaaacttctatgtaaaaatcactatgatttctg

SEQ ID NO: 91045 - DNA, 40 bp, Homo sapiens
cagaaatcatagtgatttttacatagaagtttccttgtct

SEQ ID NO: 91046 - DNA, 40 bp, Homo sapiens
gacaaggaaacttctatgtaaaaatcactatgatttctga

SEQ ID NO: 91047 - DNA, 40 bp, Homo sapiens
tcagaaatcatagtgatttttacatagaagtttccttgtc

SEQ ID NO: 91048 - DNA, 40 bp, Homo sapiens
acaaggaaacttctatgtaaaaatcactatgatttctgaa

SEQ ID NO: 91049 - DNA, 40 bp, Homo sapiens
ttcagaaatcatagtgatttttacatagaagtttccttgt

SEQ ID NO: 91050 - DNA, 40 bp, Homo sapiens
caaggaaacttctatgtaaaaatcactatgatttctgaat

SEQ ID NO: 91051 - DNA, 40 bp, Homo sapiens
attcagaaatcatagtgatttttacatagaagtttccttg

SEQ ID NO: 91052 - DNA, 40 bp, Homo sapiens
aaggaaacttctatgtaaaaatcactatgatttctgaatt

SEQ ID NO: 91053 - DNA, 40 bp, Homo sapiens
aattcagaaatcatagtgatttttacatagaagtttcctt

SEQ ID NO: 91054 - DNA, 40 bp, Homo sapiens
aggaaacttctatgtaaaaatcactatgatttctgaattg

SEQ ID NO: 91055 - DNA, 40 bp, Homo sapiens
caattcagaaatcatagtgatttttacatagaagtttcct

SEQ ID NO: 91056 - DNA, 40 bp, Homo sapiens
ggaaacttctatgtaaaaatcactatgatttctgaattgc

SEQ ID NO: 91057 - DNA, 40 bp, Homo sapiens
gcaattcagaaatcatagtgatttttacatagaagtttcc

SEQ ID NO: 91058 - DNA, 40 bp, Homo sapiens
gaaacttctatgtaaaaatcactatgatttctgaattgct

SEQ ID NO: 91059 - DNA, 40 bp, Homo sapiens
agcaattcagaaatcatagtgatttttacatagaagtttc

SEQ ID NO: 91060 - DNA, 40 bp, Homo sapiens
aaacttctatgtaaaaatcactatgatttctgaattgcta

SEQ ID NO: 91061 - DNA, 40 bp, Homo sapiens
tagcaattcagaaatcatagtgatttttacatagaagttt

SEQ ID NO: 91062 - DNA, 40 bp, Homo sapiens
aacttctatgtaaaaatcactatgatttctgaattgctat

SEQ ID NO: 91063 - DNA, 40 bp, Homo sapiens
atagcaattcagaaatcatagtgatttttacatagaagtt

SEQ ID NO: 91064 - DNA, 40 bp, Homo sapiens
acttctatgtaaaaatcactatgatttctgaattgctatg

SEQ ID NO: 91065 - DNA, 40 bp, Homo sapiens
catagcaattcagaaatcatagtgatttttacatagaagt

SEQ ID NO: 91066 - DNA, 40 bp, Homo sapiens
cttctatgtaaaaatcactatgatttctgaattgctatgt

SEQ ID NO: 91067 - DNA, 40 bp, Homo sapiens
acatagcaattcagaaatcatagtgatttttacatagaag

SEQ ID NO: 91068 - DNA, 40 bp, Homo sapiens
ttctatgtaaaaatcactatgatttctgaattgctatgtg

SEQ ID NO: 91069 - DNA, 40 bp, Homo sapiens
cacatagcaattcagaaatcatagtgatttttacatagaa

SEQ ID NO: 91070 - DNA, 40 bp, Homo sapiens
tctatgtaaaaatcactatgatttctgaattgctatgtga

SEQ ID NO: 91071 - DNA, 40 bp, Homo sapiens
tcacatagcaattcagaaatcatagtgatttttacataga

SEQ ID NO: 91072 - DNA, 40 bp, Homo sapiens
ctatgtaaaaatcactatgatttctgaattgctatgtgaa

SEQ ID NO: 91073 - DNA, 40 bp, Homo sapiens
ttcacatagcaattcagaaatcatagtgatttttacatag

SEQ ID NO: 91074 - DNA, 40 bp, Homo sapiens
tatgtaaaaatcactatgatttctgaattgctatgtgaaa

SEQ ID NO: 91075 - DNA, 40 bp, Homo sapiens
tttcacatagcaattcagaaatcatagtgatttttacata

SEQ ID NO: 91076 - DNA, 40 bp, Homo sapiens
atgtaaaaatcactatgatttctgaattgctatgtgaaac

SEQ ID NO: 91077 - DNA, 40 bp, Homo sapiens
gtttcacatagcaattcagaaatcatagtgatttttacat

SEQ ID NO: 91078 - DNA, 40 bp, Homo sapiens
tgtaaaaatcactatgatttctgaattgctatgtgaaact

SEQ ID NO: 91079 - DNA, 40 bp, Homo sapiens
agtttcacatagcaattcagaaatcatagtgatttttaca

SEQ ID NO: 91080 - DNA, 40 bp, Homo sapiens
gtaaaaatcactatgatttctgaattgctatgtgaaacta

SEQ ID NO: 91081 - DNA, 40 bp, Homo sapiens
tagtttcacatagcaattcagaaatcatagtgatttttac

SEQ ID NO: 91082 - DNA, 40 bp, Homo sapiens
taaaaatcactatgatttctgaattgctatgtgaaactac

SEQ ID NO: 91083 - DNA, 40 bp, Homo sapiens
gtagtttcacatagcaattcagaaatcatagtgattttta

SEQ ID NO: 91084 - DNA, 40 bp, Homo sapiens
aaaaatcactatgatttctgaattgctatgtgaaactaca

SEQ ID NO: 91085 - DNA, 40 bp, Homo sapiens
tgtagtttcacatagcaattcagaaatcatagtgattttt

SEQ ID NO: 91086 - DNA, 40 bp, Homo sapiens
aaaatcactatgatttctgaattgctatgtgaaactacag

SEQ ID NO: 91087 - DNA, 40 bp, Homo sapiens
ctgtagtttcacatagcaattcagaaatcatagtgatttt

SEQ ID NO: 91088 - DNA, 40 bp, Homo sapiens
aaatcactatgatttctgaattgctatgtgaaactacaga

SEQ ID NO: 91089 - DNA, 40 bp, Homo sapiens
tctgtagtttcacatagcaattcagaaatcatagtgattt

SEQ ID NO: 91090 - DNA, 40 bp, Homo sapiens
aatcactatgatttctgaattgctatgtgaaactacagat

SEQ ID NO: 91091 - DNA, 40 bp, Homo sapiens
atctgtagtttcacatagcaattcagaaatcatagtgatt

SEQ ID NO: 91092 - DNA, 40 bp, Homo sapiens
atcactatgatttctgaattgctatgtgaaactacagatc

SEQ ID NO: 91093 - DNA, 40 bp, Homo sapiens
gatctgtagtttcacatagcaattcagaaatcatagtgat

SEQ ID NO: 91094 - DNA, 40 bp, Homo sapiens
tcactatgatttctgaattgctatgtgaaactacagatct

SEQ ID NO: 91095 - DNA, 40 bp, Homo sapiens
agatctgtagtttcacatagcaattcagaaatcatagtga

SEQ ID NO: 91096 - DNA, 40 bp, Homo sapiens
cactatgatttctgaattgctatgtgaaactacagatctt

SEQ ID NO: 91097 - DNA, 40 bp, Homo sapiens
aagatctgtagtttcacatagcaattcagaaatcatagtg

SEQ ID NO: 91098 - DNA, 40 bp, Homo sapiens
actatgatttctgaattgctatgtgaaactacagatcttt

SEQ ID NO: 91099 - DNA, 40 bp, Homo sapiens
aaagatctgtagtttcacatagcaattcagaaatcatagt

SEQ ID NO: 91100 - DNA, 40 bp, Homo sapiens
ctatgatttctgaattgctatgtgaaactacagatctttg

SEQ ID NO: 91101 - DNA, 40 bp, Homo sapiens
caaagatctgtagtttcacatagcaattcagaaatcatag

SEQ ID NO: 91102 - DNA, 40 bp, Homo sapiens
tatgatttctgaattgctatgtgaaactacagatctttgg

SEQ ID NO: 91103 - DNA, 40 bp, Homo sapiens
ccaaagatctgtagtttcacatagcaattcagaaatcata

SEQ ID NO: 91104 - DNA, 40 bp, Homo sapiens
atgatttctgaattgctatgtgaaactacagatctttgga

SEQ ID NO: 91105 - DNA, 40 bp, Homo sapiens
tccaaagatctgtagtttcacatagcaattcagaaatcat

SEQ ID NO: 91106 - DNA, 40 bp, Homo sapiens
tgatttctgaattgctatgtgaaactacagatctttggaa

SEQ ID NO: 91107 - DNA, 40 bp, Homo sapiens
ttccaaagatctgtagtttcacatagcaattcagaaatca

SEQ ID NO: 91108 - DNA, 40 bp, Homo sapiens
gatttctgaattgctatgtgaaactacagatctttggaac

SEQ ID NO: 91109 - DNA, 40 bp, Homo sapiens
gttccaaagatctgtagtttcacatagcaattcagaaatc

SEQ ID NO: 91110 - DNA, 40 bp, Homo sapiens
atttctgaattgctatgtgaaactacagatctttggaaca

SEQ ID NO: 91111 - DNA, 40 bp, Homo sapiens
tgttccaaagatctgtagtttcacatagcaattcagaaat

SEQ ID NO: 91112 - DNA, 40 bp, Homo sapiens
tttctgaattgctatgtgaaactacagatctttggaacac

SEQ ID NO: 91113 - DNA, 40 bp, Homo sapiens
gtgttccaaagatctgtagtttcacatagcaattcagaaa

SEQ ID NO: 91114 - DNA, 40 bp, Homo sapiens
ttctgaattgctatgtgaaactacagatctttggaacact

SEQ ID NO: 91115 - DNA, 40 bp, Homo sapiens
agtgttccaaagatctgtagtttcacatagcaattcagaa

SEQ ID NO: 91116 - DNA, 40 bp, Homo sapiens
tctgaattgctatgtgaaactacagatctttggaacactg

SEQ ID NO: 91117 - DNA, 40 bp, Homo sapiens
cagtgttccaaagatctgtagtttcacatagcaattcaga

SEQ ID NO: 91118 - DNA, 40 bp, Homo sapiens
ctgaattgctatgtgaaactacagatctttggaacactgt

SEQ ID NO: 91119 - DNA, 40 bp, Homo sapiens
acagtgttccaaagatctgtagtttcacatagcaattcag

SEQ ID NO: 91120 - DNA, 40 bp, Homo sapiens
tgaattgctatgtgaaactacagatctttggaacactgtt

SEQ ID NO: 91121 - DNA, 40 bp, Homo sapiens
aacagtgttccaaagatctgtagtttcacatagcaattca

SEQ ID NO: 91122 - DNA, 40 bp, Homo sapiens
gaattgctatgtgaaactacagatctttggaacactgttt

SEQ ID NO: 91123 - DNA, 40 bp, Homo sapiens
aaacagtgttccaaagatctgtagtttcacatagcaattc

SEQ ID NO: 91124 - DNA, 40 bp, Homo sapiens
aattgctatgtgaaactacagatctttggaacactgttta

SEQ ID NO: 91125 - DNA, 40 bp, Homo sapiens
taaacagtgttccaaagatctgtagtttcacatagcaatt

SEQ ID NO: 91126 - DNA, 40 bp, Homo sapiens
attgctatgtgaaactacagatctttggaacactgtttag

SEQ ID NO: 91127 - DNA, 40 bp, Homo sapiens
ctaaacagtgttccaaagatctgtagtttcacatagcaat

SEQ ID NO: 91128 - DNA, 40 bp, Homo sapiens
ttgctatgtgaaactacagatctttggaacactgtttagg

SEQ ID NO: 91129 - DNA, 40 bp, Homo sapiens
cctaaacagtgttccaaagatctgtagtttcacatagcaa

SEQ ID NO: 91130 - DNA, 40 bp, Homo sapiens
tgctatgtgaaactacagatctttggaacactgtttaggt

SEQ ID NO: 91131 - DNA, 40 bp, Homo sapiens
acctaaacagtgttccaaagatctgtagtttcacatagca

SEQ ID NO: 91132 - DNA, 40 bp, Homo sapiens
gctatgtgaaactacagatctttggaacactgtttaggta

SEQ ID NO: 91133 - DNA, 40 bp, Homo sapiens
tacctaaacagtgttccaaagatctgtagtttcacatagc

SEQ ID NO: 91134 - DNA, 40 bp, Homo sapiens
ctatgtgaaactacagatctttggaacactgtttaggtag

SEQ ID NO: 91135 - DNA, 40 bp, Homo sapiens
ctacctaaacagtgttccaaagatctgtagtttcacatag

SEQ ID NO: 91136 - DNA, 40 bp, Homo sapiens
tatgtgaaactacagatctttggaacactgtttaggtagg

SEQ ID NO: 91137 - DNA, 40 bp, Homo sapiens
cctacctaaacagtgttccaaagatctgtagtttcacata

SEQ ID NO: 91138 - DNA, 40 bp, Homo sapiens
atgtgaaactacagatctttggaacactgtttaggtaggg

SEQ ID NO: 91139 - DNA, 40 bp, Homo sapiens
ccctacctaaacagtgttccaaagatctgtagtttcacat

SEQ ID NO: 91140 - DNA, 40 bp, Homo sapiens
tgtgaaactacagatctttggaacactgtttaggtagggt

SEQ ID NO: 91141 - DNA, 40 bp, Homo sapiens
accctacctaaacagtgttccaaagatctgtagtttcaca

SEQ ID NO: 91142 - DNA, 40 bp, Homo sapiens
gtgaaactacagatctttggaacactgtttaggtagggtg

SEQ ID NO: 91143 - DNA, 40 bp, Homo sapiens
caccctacctaaacagtgttccaaagatctgtagtttcac

SEQ ID NO: 91144 - DNA, 40 bp, Homo sapiens
tgaaactacagatctttggaacactgtttaggtagggtgt

SEQ ID NO: 91145 - DNA, 40 bp, Homo sapiens
acaccctacctaaacagtgttccaaagatctgtagtttca

SEQ ID NO: 91146 - DNA, 40 bp, Homo sapiens
gaaactacagatctttggaacactgtttaggtagggtgtt

SEQ ID NO: 91147 - DNA, 40 bp, Homo sapiens
aacaccctacctaaacagtgttccaaagatctgtagtttc

SEQ ID NO: 91148 - DNA, 40 bp, Homo sapiens
aaactacagatctttggaacactgtttaggtagggtgtta

SEQ ID NO: 91149 - DNA, 40 bp, Homo sapiens
taacaccctacctaaacagtgttccaaagatctgtagttt

SEQ ID NO: 91150 - DNA, 40 bp, Homo sapiens
aactacagatctttggaacactgtttaggtagggtgttaa

SEQ ID NO: 91151 - DNA, 40 bp, Homo sapiens
ttaacaccctacctaaacagtgttccaaagatctgtagtt

SEQ ID NO: 91152 - DNA, 40 bp, Homo sapiens
actacagatctttggaacactgtttaggtagggtgttaag

SEQ ID NO: 91153 - DNA, 40 bp, Homo sapiens
cttaacaccctacctaaacagtgttccaaagatctgtagt

SEQ ID NO: 91154 - DNA, 40 bp, Homo sapiens
ctacagatctttggaacactgtttaggtagggtgttaaga

SEQ ID NO: 91155 - DNA, 40 bp, Homo sapiens
tcttaacaccctacctaaacagtgttccaaagatctgtag

SEQ ID NO: 91156 - DNA, 40 bp, Homo sapiens
tacagatctttggaacactgtttaggtagggtgttaagac

SEQ ID NO: 91157 - DNA, 40 bp, Homo sapiens
gtcttaacaccctacctaaacagtgttccaaagatctgta

SEQ ID NO: 91158 - DNA, 40 bp, Homo sapiens
acagatctttggaacactgtttaggtagggtgttaagact

SEQ ID NO: 91159 - DNA, 40 bp, Homo sapiens
agtcttaacaccctacctaaacagtgttccaaagatctgt

SEQ ID NO: 91160 - DNA, 40 bp, Homo sapiens
cagatctttggaacactgtttaggtagggtgttaagactt

SEQ ID NO: 91161 - DNA, 40 bp, Homo sapiens
aagtcttaacaccctacctaaacagtgttccaaagatctg

SEQ ID NO: 91162 - DNA, 40 bp, Homo sapiens
agatctttggaacactgtttaggtagggtgttaagactta

SEQ ID NO: 91163 - DNA, 40 bp, Homo sapiens
taagtcttaacaccctacctaaacagtgttccaaagatct

SEQ ID NO: 91164 - DNA, 40 bp, Homo sapiens
gatctttggaacactgtttaggtagggtgttaagacttac

SEQ ID NO: 91165 - DNA, 40 bp, Homo sapiens
gtaagtcttaacaccctacctaaacagtgttccaaagatc

SEQ ID NO: 91166 - DNA, 40 bp, Homo sapiens
atctttggaacactgtttaggtagggtgttaagacttaca

SEQ ID NO: 91167 - DNA, 40 bp, Homo sapiens
tgtaagtcttaacaccctacctaaacagtgttccaaagat

SEQ ID NO: 91168 - DNA, 40 bp, Homo sapiens
tctttggaacactgtttaggtagggtgttaagacttacac

SEQ ID NO: 91169 - DNA, 40 bp, Homo sapiens
gtgtaagtcttaacaccctacctaaacagtgttccaaaga

SEQ ID NO: 91170 - DNA, 40 bp, Homo sapiens
ctttggaacactgtttaggtagggtgttaagacttacaca

SEQ ID NO: 91171 - DNA, 40 bp, Homo sapiens
tgtgtaagtcttaacaccctacctaaacagtgttccaaag

SEQ ID NO: 91172 - DNA, 40 bp, Homo sapiens
tttggaacactgtttaggtagggtgttaagacttacacag

SEQ ID NO: 91173 - DNA, 40 bp, Homo sapiens
ctgtgtaagtcttaacaccctacctaaacagtgttccaaa

SEQ ID NO: 91174 - DNA, 40 bp, Homo sapiens
ttggaacactgtttaggtagggtgttaagacttacacagt

SEQ ID NO: 91175 - DNA, 40 bp, Homo sapiens
actgtgtaagtcttaacaccctacctaaacagtgttccaa

SEQ ID NO: 91176 - DNA, 40 bp, Homo sapiens
tggaacactgtttaggtagggtgttaagacttacacagta

SEQ ID NO: 91177 - DNA, 40 bp, Homo sapiens
tactgtgtaagtcttaacaccctacctaaacagtgttcca

SEQ ID NO: 91178 - DNA, 40 bp, Homo sapiens
ggaacactgtttaggtagggtgttaagacttacacagtac

SEQ ID NO: 91179 - DNA, 40 bp, Homo sapiens
gtactgtgtaagtcttaacaccctacctaaacagtgttcc

SEQ ID NO: 91180 - DNA, 40 bp, Homo sapiens
gaacactgtttaggtagggtgttaagacttacacagtacc

SEQ ID NO: 91181 - DNA, 40 bp, Homo sapiens
ggtactgtgtaagtcttaacaccctacctaaacagtgttc

SEQ ID NO: 91182 - DNA, 40 bp, Homo sapiens
aacactgtttaggtagggtgttaagacttacacagtacct

SEQ ID NO: 91183 - DNA, 40 bp, Homo sapiens
aggtactgtgtaagtcttaacaccctacctaaacagtgtt

SEQ ID NO: 91184 - DNA, 40 bp, Homo sapiens
acactgtttaggtagggtgttaagacttacacagtacctc

SEQ ID NO: 91185 - DNA, 40 bp, Homo sapiens
gaggtactgtgtaagtcttaacaccctacctaaacagtgt

SEQ ID NO: 91186 - DNA, 40 bp, Homo sapiens
cactgtttaggtagggtgttaagacttacacagtacctcg

SEQ ID NO: 91187 - DNA, 40 bp, Homo sapiens
cgaggtactgtgtaagtcttaacaccctacctaaacagtg

SEQ ID NO: 91188 - DNA, 40 bp, Homo sapiens
actgtttaggtagggtgttaagacttacacagtacctcgt

SEQ ID NO: 91189 - DNA, 40 bp, Homo sapiens
acgaggtactgtgtaagtcttaacaccctacctaaacagt

SEQ ID NO: 91190 - DNA, 40 bp, Homo sapiens
ctgtttaggtagggtgttaagacttacacagtacctcgtt

SEQ ID NO: 91191 - DNA, 40 bp, Homo sapiens
aacgaggtactgtgtaagtcttaacaccctacctaaacag

SEQ ID NO: 91192 - DNA, 40 bp, Homo sapiens
tgtttaggtagggtgttaagacttacacagtacctcgttt

SEQ ID NO: 91193 - DNA, 40 bp, Homo sapiens
aaacgaggtactgtgtaagtcttaacaccctacctaaaca

SEQ ID NO: 91194 - DNA, 40 bp, Homo sapiens
gtttaggtagggtgttaagacttacacagtacctcgtttc

SEQ ID NO: 91195 - DNA, 40 bp, Homo sapiens
gaaacgaggtactgtgtaagtcttaacaccctacctaaac

SEQ ID NO: 91196 - DNA, 40 bp, Homo sapiens
tttaggtagggtgttaagacttacacagtacctcgtttct

SEQ ID NO: 91197 - DNA, 40 bp, Homo sapiens
agaaacgaggtactgtgtaagtcttaacaccctacctaaa

SEQ ID NO: 91198 - DNA, 40 bp, Homo sapiens
ttaggtagggtgttaagacttacacagtacctcgtttcta

SEQ ID NO: 91199 - DNA, 40 bp, Homo sapiens
tagaaacgaggtactgtgtaagtcttaacaccctacctaa

SEQ ID NO: 91200 - DNA, 40 bp, Homo sapiens
taggtagggtgttaagacttacacagtacctcgtttctac

SEQ ID NO: 91201 - DNA, 40 bp, Homo sapiens
gtagaaacgaggtactgtgtaagtcttaacaccctaccta

SEQ ID NO: 91202 - DNA, 40 bp, Homo sapiens
aggtagggtgttaagacttacacagtacctcgtttctaca

SEQ ID NO: 91203 - DNA, 40 bp, Homo sapiens
tgtagaaacgaggtactgtgtaagtcttaacaccctacct

SEQ ID NO: 91204 - DNA, 40 bp, Homo sapiens
ggtagggtgttaagacttacacagtacctcgtttctacac

SEQ ID NO: 91205 - DNA, 40 bp, Homo sapiens
gtgtagaaacgaggtactgtgtaagtcttaacaccctacc

SEQ ID NO: 91206 - DNA, 40 bp, Homo sapiens
gtagggtgttaagacttacacagtacctcgtttctacaca

SEQ ID NO: 91207 - DNA, 40 bp, Homo sapiens
tgtgtagaaacgaggtactgtgtaagtcttaacaccctac

SEQ ID NO: 91208 - DNA, 40 bp, Homo sapiens
tagggtgttaagacttacacagtacctcgtttctacacag

SEQ ID NO: 91209 - DNA, 40 bp, Homo sapiens
ctgtgtagaaacgaggtactgtgtaagtcttaacacccta

SEQ ID NO: 91210 - DNA, 40 bp, Homo sapiens
agggtgttaagacttacacagtacctcgtttctacacaga

SEQ ID NO: 91211 - DNA, 40 bp, Homo sapiens
tctgtgtagaaacgaggtactgtgtaagtcttaacaccct

SEQ ID NO: 91212 - DNA, 40 bp, Homo sapiens
gggtgttaagacttacacagtacctcgtttctacacagag

SEQ ID NO: 91213 - DNA, 40 bp, Homo sapiens
ctctgtgtagaaacgaggtactgtgtaagtcttaacaccc

SEQ ID NO: 91214 - DNA, 40 bp, Homo sapiens
ggtgttaagacttacacagtacctcgtttctacacagaga

SEQ ID NO: 91215 - DNA, 40 bp, Homo sapiens
tctctgtgtagaaacgaggtactgtgtaagtcttaacacc

SEQ ID NO: 91216 - DNA, 40 bp, Homo sapiens
gtgttaagacttacacagtacctcgtttctacacagagaa

SEQ ID NO: 91217 - DNA, 40 bp, Homo sapiens
ttctctgtgtagaaacgaggtactgtgtaagtcttaacac

SEQ ID NO: 91218 - DNA, 40 bp, Homo sapiens
tgttaagacttacacagtacctcgtttctacacagagaaa

SEQ ID NO: 91219 - DNA, 40 bp, Homo sapiens
tttctctgtgtagaaacgaggtactgtgtaagtcttaaca

SEQ ID NO: 91220 - DNA, 40 bp, Homo sapiens
gttaagacttacacagtacctcgtttctacacagagaaag

SEQ ID NO: 91221 - DNA, 40 bp, Homo sapiens
ctttctctgtgtagaaacgaggtactgtgtaagtcttaac

SEQ ID NO: 91222 - DNA, 40 bp, Homo sapiens
ttaagacttacacagtacctcgtttctacacagagaaaga

SEQ ID NO: 91223 - DNA, 40 bp, Homo sapiens
tctttctctgtgtagaaacgaggtactgtgtaagtcttaa

SEQ ID NO: 91224 - DNA, 40 bp, Homo sapiens
taagacttacacagtacctcgtttctacacagagaaagaa

SEQ ID NO: 91225 - DNA, 40 bp, Homo sapiens
ttctttctctgtgtagaaacgaggtactgtgtaagtctta

SEQ ID NO: 91226 - DNA, 40 bp, Homo sapiens
aagacttacacagtacctcgtttctacacagagaaagaaa

SEQ ID NO: 91227 - DNA, 40 bp, Homo sapiens
tttctttctctgtgtagaaacgaggtactgtgtaagtctt

SEQ ID NO: 91228 - DNA, 40 bp, Homo sapiens
agacttacacagtacctcgtttctacacagagaaagaaat

SEQ ID NO: 91229 - DNA, 40 bp, Homo sapiens
atttctttctctgtgtagaaacgaggtactgtgtaagtct

SEQ ID NO: 91230 - DNA, 40 bp, Homo sapiens
gacttacacagtacctcgtttctacacagagaaagaaatg

SEQ ID NO: 91231 - DNA, 40 bp, Homo sapiens
catttctttctctgtgtagaaacgaggtactgtgtaagtc

SEQ ID NO: 91232 - DNA, 40 bp, Homo sapiens
acttacacagtacctcgtttctacacagagaaagaaatgg

SEQ ID NO: 91233 - DNA, 40 bp, Homo sapiens
ccatttctttctctgtgtagaaacgaggtactgtgtaagt

SEQ ID NO: 91234 - DNA, 40 bp, Homo sapiens
cttacacagtacctcgtttctacacagagaaagaaatggc

SEQ ID NO: 91235 - DNA, 40 bp, Homo sapiens
gccatttctttctctgtgtagaaacgaggtactgtgtaag

SEQ ID NO: 91236 - DNA, 40 bp, Homo sapiens
ttacacagtacctcgtttctacacagagaaagaaatggcc

SEQ ID NO: 91237 - DNA, 40 bp, Homo sapiens
ggccatttctttctctgtgtagaaacgaggtactgtgtaa

SEQ ID NO: 91238 - DNA, 40 bp, Homo sapiens
tacacagtacctcgtttctacacagagaaagaaatggcca

SEQ ID NO: 91239 - DNA, 40 bp, Homo sapiens
tggccatttctttctctgtgtagaaacgaggtactgtgta

SEQ ID NO: 91240 - DNA, 40 bp, Homo sapiens
acacagtacctcgtttctacacagagaaagaaatggccat

SEQ ID NO: 91241 - DNA, 40 bp, Homo sapiens
atggccatttctttctctgtgtagaaacgaggtactgtgt

SEQ ID NO: 91242 - DNA, 40 bp, Homo sapiens
cacagtacctcgtttctacacagagaaagaaatggccata

SEQ ID NO: 91243 - DNA, 40 bp, Homo sapiens
tatggccatttctttctctgtgtagaaacgaggtactgtg

SEQ ID NO: 91244 - DNA, 40 bp, Homo sapiens
acagtacctcgtttctacacagagaaagaaatggccatac

SEQ ID NO: 91245 - DNA, 40 bp, Homo sapiens
gtatggccatttctttctctgtgtagaaacgaggtactgt

SEQ ID NO: 91246 - DNA, 40 bp, Homo sapiens
cagtacctcgtttctacacagagaaagaaatggccatact

SEQ ID NO: 91247 - DNA, 40 bp, Homo sapiens
agtatggccatttctttctctgtgtagaaacgaggtactg

SEQ ID NO: 91248 - DNA, 40 bp, Homo sapiens
agtacctcgtttctacacagagaaagaaatggccatactt

SEQ ID NO: 91249 - DNA, 40 bp, Homo sapiens
aagtatggccatttctttctctgtgtagaaacgaggtact

SEQ ID NO: 91250 - DNA, 40 bp, Homo sapiens
gtacctcgtttctacacagagaaagaaatggccatacttc

SEQ ID NO: 91251 - DNA, 40 bp, Homo sapiens
gaagtatggccatttctttctctgtgtagaaacgaggtac

SEQ ID NO: 91252 - DNA, 40 bp, Homo sapiens
tacctcgtttctacacagagaaagaaatggccatacttca

SEQ ID NO: 91253 - DNA, 40 bp, Homo sapiens
tgaagtatggccatttctttctctgtgtagaaacgaggta

SEQ ID NO: 91254 - DNA, 40 bp, Homo sapiens
acctcgtttctacacagagaaagaaatggccatacttcag

SEQ ID NO: 91255 - DNA, 40 bp, Homo sapiens
ctgaagtatggccatttctttctctgtgtagaaacgaggt

SEQ ID NO: 91256 - DNA, 40 bp, Homo sapiens
cctcgtttctacacagagaaagaaatggccatacttcagg

SEQ ID NO: 91257 - DNA, 40 bp, Homo sapiens
cctgaagtatggccatttctttctctgtgtagaaacgagg

SEQ ID NO: 91258 - DNA, 40 bp, Homo sapiens
ctcgtttctacacagagaaagaaatggccatacttcagga

SEQ ID NO: 91259 - DNA, 40 bp, Homo sapiens
tcctgaagtatggccatttctttctctgtgtagaaacgag

SEQ ID NO: 91260 - DNA, 40 bp, Homo sapiens
tcgtttctacacagagaaagaaatggccatacttcaggaa

SEQ ID NO: 91261 - DNA, 40 bp, Homo sapiens
ttcctgaagtatggccatttctttctctgtgtagaaacga

SEQ ID NO: 91262 - DNA, 40 bp, Homo sapiens
cgtttctacacagagaaagaaatggccatacttcaggaac

SEQ ID NO: 91263 - DNA, 40 bp, Homo sapiens
gttcctgaagtatggccatttctttctctgtgtagaaacg

SEQ ID NO: 91264 - DNA, 40 bp, Homo sapiens
gtttctacacagagaaagaaatggccatacttcaggaact

SEQ ID NO: 91265 - DNA, 40 bp, Homo sapiens
agttcctgaagtatggccatttctttctctgtgtagaaac

SEQ ID NO: 91266 - DNA, 40 bp, Homo sapiens
tttctacacagagaaagaaatggccatacttcaggaactg

SEQ ID NO: 91267 - DNA, 40 bp, Homo sapiens
cagttcctgaagtatggccatttctttctctgtgtagaaa

SEQ ID NO: 91268 - DNA, 40 bp, Homo sapiens
ttctacacagagaaagaaatggccatacttcaggaactgc

SEQ ID NO: 91269 - DNA, 40 bp, Homo sapiens
gcagttcctgaagtatggccatttctttctctgtgtagaa

SEQ ID NO: 91270 - DNA, 40 bp, Homo sapiens
tctacacagagaaagaaatggccatacttcaggaactgca

SEQ ID NO: 91271 - DNA, 40 bp, Homo sapiens
tgcagttcctgaagtatggccatttctttctctgtgtaga

SEQ ID NO: 91272 - DNA, 40 bp, Homo sapiens
ctacacagagaaagaaatggccatacttcaggaactgcag

SEQ ID NO: 91273 - DNA, 40 bp, Homo sapiens
ctgcagttcctgaagtatggccatttctttctctgtgtag

SEQ ID NO: 91274 - DNA, 40 bp, Homo sapiens
tacacagagaaagaaatggccatacttcaggaactgcagt

SEQ ID NO: 91275 - DNA, 40 bp, Homo sapiens
actgcagttcctgaagtatggccatttctttctctgtgta

SEQ ID NO: 91276 - DNA, 40 bp, Homo sapiens
acacagagaaagaaatggccatacttcaggaactgcagtg

SEQ ID NO: 91277 - DNA, 40 bp, Homo sapiens
cactgcagttcctgaagtatggccatttctttctctgtgt

SEQ ID NO: 91278 - DNA, 40 bp, Homo sapiens
cacagagaaagaaatggccatacttcaggaactgcagtgc

SEQ ID NO: 91279 - DNA, 40 bp, Homo sapiens
gcactgcagttcctgaagtatggccatttctttctctgtg

SEQ ID NO: 91280 - DNA, 40 bp, Homo sapiens
acagagaaagaaatggccatacttcaggaactgcagtgct

SEQ ID NO: 91281 - DNA, 40 bp, Homo sapiens
agcactgcagttcctgaagtatggccatttctttctctgt

SEQ ID NO: 91282 - DNA, 40 bp, Homo sapiens
cagagaaagaaatggccatacttcaggaactgcagtgctt

SEQ ID NO: 91283 - DNA, 40 bp, Homo sapiens
aagcactgcagttcctgaagtatggccatttctttctctg

SEQ ID NO: 91284 - DNA, 40 bp, Homo sapiens
agagaaagaaatggccatacttcaggaactgcagtgctta

SEQ ID NO: 91285 - DNA, 40 bp, Homo sapiens
taagcactgcagttcctgaagtatggccatttctttctct

SEQ ID NO: 91286 - DNA, 40 bp, Homo sapiens
gagaaagaaatggccatacttcaggaactgcagtgcttat

SEQ ID NO: 91287 - DNA, 40 bp, Homo sapiens
ataagcactgcagttcctgaagtatggccatttctttctc

SEQ ID NO: 91288 - DNA, 40 bp, Homo sapiens
agaaagaaatggccatacttcaggaactgcagtgcttatg

SEQ ID NO: 91289 - DNA, 40 bp, Homo sapiens
cataagcactgcagttcctgaagtatggccatttctttct

SEQ ID NO: 91290 - DNA, 40 bp, Homo sapiens
gaaagaaatggccatacttcaggaactgcagtgcttatga

SEQ ID NO: 91291 - DNA, 40 bp, Homo sapiens
tcataagcactgcagttcctgaagtatggccatttctttc

SEQ ID NO: 91292 - DNA, 40 bp, Homo sapiens
aaagaaatggccatacttcaggaactgcagtgcttatgag

SEQ ID NO: 91293 - DNA, 40 bp, Homo sapiens
ctcataagcactgcagttcctgaagtatggccatttcttt

SEQ ID NO: 91294 - DNA, 40 bp, Homo sapiens
aagaaatggccatacttcaggaactgcagtgcttatgagg

SEQ ID NO: 91295 - DNA, 40 bp, Homo sapiens
cctcataagcactgcagttcctgaagtatggccatttctt

SEQ ID NO: 91296 - DNA, 40 bp, Homo sapiens
agaaatggccatacttcaggaactgcagtgcttatgaggg

SEQ ID NO: 91297 - DNA, 40 bp, Homo sapiens
ccctcataagcactgcagttcctgaagtatggccatttct

SEQ ID NO: 91298 - DNA, 40 bp, Homo sapiens
gaaatggccatacttcaggaactgcagtgcttatgagggg

SEQ ID NO: 91299 - DNA, 40 bp, Homo sapiens
cccctcataagcactgcagttcctgaagtatggccatttc

SEQ ID NO: 91300 - DNA, 40 bp, Homo sapiens
aaatggccatacttcaggaactgcagtgcttatgagggga

SEQ ID NO: 91301 - DNA, 40 bp, Homo sapiens
tcccctcataagcactgcagttcctgaagtatggccattt

SEQ ID NO: 91302 - DNA, 40 bp, Homo sapiens
aatggccatacttcaggaactgcagtgcttatgaggggat

SEQ ID NO: 91303 - DNA, 40 bp, Homo sapiens
atcccctcataagcactgcagttcctgaagtatggccatt

SEQ ID NO: 91304 - DNA, 40 bp, Homo sapiens
atggccatacttcaggaactgcagtgcttatgaggggata

SEQ ID NO: 91305 - DNA, 40 bp, Homo sapiens
tatcccctcataagcactgcagttcctgaagtatggccat

SEQ ID NO: 91306 - DNA, 40 bp, Homo sapiens
tggccatacttcaggaactgcagtgcttatgaggggatat

SEQ ID NO: 91307 - DNA, 40 bp, Homo sapiens
atatcccctcataagcactgcagttcctgaagtatggcca

SEQ ID NO: 91308 - DNA, 40 bp, Homo sapiens
ggccatacttcaggaactgcagtgcttatgaggggatatt

SEQ ID NO: 91309 - DNA, 40 bp, Homo sapiens
aatatcccctcataagcactgcagttcctgaagtatggcc

SEQ ID NO: 91310 - DNA, 40 bp, Homo sapiens
gccatacttcaggaactgcagtgcttatgaggggatattt

SEQ ID NO: 91311 - DNA, 40 bp, Homo sapiens
aaatatcccctcataagcactgcagttcctgaagtatggc

SEQ ID NO: 91312 - DNA, 40 bp, Homo sapiens
ccatacttcaggaactgcagtgcttatgaggggatattta

SEQ ID NO: 91313 - DNA, 40 bp, Homo sapiens
taaatatcccctcataagcactgcagttcctgaagtatgg

SEQ ID NO: 91314 - DNA, 40 bp, Homo sapiens
catacttcaggaactgcagtgcttatgaggggatatttag

SEQ ID NO: 91315 - DNA, 40 bp, Homo sapiens
ctaaatatcccctcataagcactgcagttcctgaagtatg

SEQ ID NO: 91316 - DNA, 40 bp, Homo sapiens
atacttcaggaactgcagtgcttatgaggggatatttagg

SEQ ID NO: 91317 - DNA, 40 bp, Homo sapiens
cctaaatatcccctcataagcactgcagttcctgaagtat

SEQ ID NO: 91318 - DNA, 40 bp, Homo sapiens
tacttcaggaactgcagtgcttatgaggggatatttaggc

SEQ ID NO: 91319 - DNA, 40 bp, Homo sapiens
gcctaaatatcccctcataagcactgcagttcctgaagta

SEQ ID NO: 91320 - DNA, 40 bp, Homo sapiens
acttcaggaactgcagtgcttatgaggggatatttaggcc

SEQ ID NO: 91321 - DNA, 40 bp, Homo sapiens
ggcctaaatatcccctcataagcactgcagttcctgaagt

SEQ ID NO: 91322 - DNA, 40 bp, Homo sapiens
cttcaggaactgcagtgcttatgaggggatatttaggcct

SEQ ID NO: 91323 - DNA, 40 bp, Homo sapiens
aggcctaaatatcccctcataagcactgcagttcctgaag

SEQ ID NO: 91324 - DNA, 40 bp, Homo sapiens
ttcaggaactgcagtgcttatgaggggatatttaggcctc

SEQ ID NO: 91325 - DNA, 40 bp, Homo sapiens
gaggcctaaatatcccctcataagcactgcagttcctgaa

SEQ ID NO: 91326 - DNA, 40 bp, Homo sapiens
tcaggaactgcagtgcttatgaggggatatttaggcctct

SEQ ID NO: 91327 - DNA, 40 bp, Homo sapiens
agaggcctaaatatcccctcataagcactgcagttcctga

SEQ ID NO: 91328 - DNA, 40 bp, Homo sapiens
caggaactgcagtgcttatgaggggatatttaggcctctt

SEQ ID NO: 91329 - DNA, 40 bp, Homo sapiens
aagaggcctaaatatcccctcataagcactgcagttcctg

SEQ ID NO: 91330 - DNA, 40 bp, Homo sapiens
aggaactgcagtgcttatgaggggatatttaggcctcttg

SEQ ID NO: 91331 - DNA, 40 bp, Homo sapiens
caagaggcctaaatatcccctcataagcactgcagttcct

SEQ ID NO: 91332 - DNA, 40 bp, Homo sapiens
ggaactgcagtgcttatgaggggatatttaggcctcttga

SEQ ID NO: 91333 - DNA, 40 bp, Homo sapiens
tcaagaggcctaaatatcccctcataagcactgcagttcc

SEQ ID NO: 91334 - DNA, 40 bp, Homo sapiens
gaactgcagtgcttatgaggggatatttaggcctcttgaa

SEQ ID NO: 91335 - DNA, 40 bp, Homo sapiens
ttcaagaggcctaaatatcccctcataagcactgcagttc

SEQ ID NO: 91336 - DNA, 40 bp, Homo sapiens
aactgcagtgcttatgaggggatatttaggcctcttgaat

SEQ ID NO: 91337 - DNA, 40 bp, Homo sapiens
attcaagaggcctaaatatcccctcataagcactgcagtt

SEQ ID NO: 91338 - DNA, 40 bp, Homo sapiens
actgcagtgcttatgaggggatatttaggcctcttgaatt

SEQ ID NO: 91339 - DNA, 40 bp, Homo sapiens
aattcaagaggcctaaatatcccctcataagcactgcagt

SEQ ID NO: 91340 - DNA, 40 bp, Homo sapiens
ctgcagtgcttatgaggggatatttaggcctcttgaattt

SEQ ID NO: 91341 - DNA, 40 bp, Homo sapiens
aaattcaagaggcctaaatatcccctcataagcactgcag

SEQ ID NO: 91342 - DNA, 40 bp, Homo sapiens
tgcagtgcttatgaggggatatttaggcctcttgaatttt

SEQ ID NO: 91343 - DNA, 40 bp, Homo sapiens
aaaattcaagaggcctaaatatcccctcataagcactgca

SEQ ID NO: 91344 - DNA, 40 bp, Homo sapiens
gcagtgcttatgaggggatatttaggcctcttgaattttt

SEQ ID NO: 91345 - DNA, 40 bp, Homo sapiens
aaaaattcaagaggcctaaatatcccctcataagcactgc

SEQ ID NO: 91346 - DNA, 40 bp, Homo sapiens
cagtgcttatgaggggatatttaggcctcttgaatttttg

SEQ ID NO: 91347 - DNA, 40 bp, Homo sapiens
caaaaattcaagaggcctaaatatcccctcataagcactg

SEQ ID NO: 91348 - DNA, 40 bp, Homo sapiens
agtgcttatgaggggatatttaggcctcttgaatttttga

SEQ ID NO: 91349 - DNA, 40 bp, Homo sapiens
tcaaaaattcaagaggcctaaatatcccctcataagcact

SEQ ID NO: 91350 - DNA, 40 bp, Homo sapiens
gtgcttatgaggggatatttaggcctcttgaatttttgat

SEQ ID NO: 91351 - DNA, 40 bp, Homo sapiens
atcaaaaattcaagaggcctaaatatcccctcataagcac

SEQ ID NO: 91352 - DNA, 40 bp, Homo sapiens
tgcttatgaggggatatttaggcctcttgaatttttgatg

SEQ ID NO: 91353 - DNA, 40 bp, Homo sapiens
catcaaaaattcaagaggcctaaatatcccctcataagca

SEQ ID NO: 91354 - DNA, 40 bp, Homo sapiens
gcttatgaggggatatttaggcctcttgaatttttgatgt

SEQ ID NO: 91355 - DNA, 40 bp, Homo sapiens
acatcaaaaattcaagaggcctaaatatcccctcataagc

SEQ ID NO: 91356 - DNA, 40 bp, Homo sapiens
cttatgaggggatatttaggcctcttgaatttttgatgta

SEQ ID NO: 91357 - DNA, 40 bp, Homo sapiens
tacatcaaaaattcaagaggcctaaatatcccctcataag

SEQ ID NO: 91358 - DNA, 40 bp, Homo sapiens
ttatgaggggatatttaggcctcttgaatttttgatgtag

SEQ ID NO: 91359 - DNA, 40 bp, Homo sapiens
ctacatcaaaaattcaagaggcctaaatatcccctcataa

SEQ ID NO: 91360 - DNA, 40 bp, Homo sapiens
tatgaggggatatttaggcctcttgaatttttgatgtaga

SEQ ID NO: 91361 - DNA, 40 bp, Homo sapiens
tctacatcaaaaattcaagaggcctaaatatcccctcata

SEQ ID NO: 91362 - DNA, 40 bp, Homo sapiens
atgaggggatatttaggcctcttgaatttttgatgtagat

SEQ ID NO: 91363 - DNA, 40 bp, Homo sapiens
atctacatcaaaaattcaagaggcctaaatatcccctcat

SEQ ID NO: 91364 - DNA, 40 bp, Homo sapiens
tgaggggatatttaggcctcttgaatttttgatgtagatg

SEQ ID NO: 91365 - DNA, 40 bp, Homo sapiens
catctacatcaaaaattcaagaggcctaaatatcccctca

SEQ ID NO: 91366 - DNA, 40 bp, Homo sapiens
gaggggatatttaggcctcttgaatttttgatgtagatgg

SEQ ID NO: 91367 - DNA, 40 bp, Homo sapiens
ccatctacatcaaaaattcaagaggcctaaatatcccctc

SEQ ID NO: 91368 - DNA, 40 bp, Homo sapiens
aggggatatttaggcctcttgaatttttgatgtagatggg

SEQ ID NO: 91369 - DNA, 40 bp, Homo sapiens
cccatctacatcaaaaattcaagaggcctaaatatcccct

SEQ ID NO: 91370 - DNA, 40 bp, Homo sapiens
ggggatatttaggcctcttgaatttttgatgtagatgggc

SEQ ID NO: 91371 - DNA, 40 bp, Homo sapiens
gcccatctacatcaaaaattcaagaggcctaaatatcccc

SEQ ID NO: 91372 - DNA, 40 bp, Homo sapiens
gggatatttaggcctcttgaatttttgatgtagatgggca

SEQ ID NO: 91373 - DNA, 40 bp, Homo sapiens
tgcccatctacatcaaaaattcaagaggcctaaatatccc

SEQ ID NO: 91374 - DNA, 40 bp, Homo sapiens
ggatatttaggcctcttgaatttttgatgtagatgggcat

SEQ ID NO: 91375 - DNA, 40 bp, Homo sapiens
atgcccatctacatcaaaaattcaagaggcctaaatatcc

SEQ ID NO: 91376 - DNA, 40 bp, Homo sapiens
gatatttaggcctcttgaatttttgatgtagatgggcatt

SEQ ID NO: 91377 - DNA, 40 bp, Homo sapiens
aatgcccatctacatcaaaaattcaagaggcctaaatatc

SEQ ID NO: 91378 - DNA, 40 bp, Homo sapiens
atatttaggcctcttgaatttttgatgtagatgggcattt

SEQ ID NO: 91379 - DNA, 40 bp, Homo sapiens
aaatgcccatctacatcaaaaattcaagaggcctaaatat

SEQ ID NO: 91380 - DNA, 40 bp, Homo sapiens
tatttaggcctcttgaatttttgatgtagatgggcatttt

SEQ ID NO: 91381 - DNA, 40 bp, Homo sapiens
aaaatgcccatctacatcaaaaattcaagaggcctaaata

SEQ ID NO: 91382 - DNA, 40 bp, Homo sapiens
atttaggcctcttgaatttttgatgtagatgggcattttt

SEQ ID NO: 91383 - DNA, 40 bp, Homo sapiens
aaaaatgcccatctacatcaaaaattcaagaggcctaaat

SEQ ID NO: 91384 - DNA, 40 bp, Homo sapiens
tttaggcctcttgaatttttgatgtagatgggcatttttt

SEQ ID NO: 91385 - DNA, 40 bp, Homo sapiens
aaaaaatgcccatctacatcaaaaattcaagaggcctaaa

SEQ ID NO: 91386 - DNA, 40 bp, Homo sapiens
ttaggcctcttgaatttttgatgtagatgggcattttttt

SEQ ID NO: 91387 - DNA, 40 bp, Homo sapiens
aaaaaaatgcccatctacatcaaaaattcaagaggcctaa

SEQ ID NO: 91388 - DNA, 40 bp, Homo sapiens
taggcctcttgaatttttgatgtagatgggcattttttta

SEQ ID NO: 91389 - DNA, 40 bp, Homo sapiens
taaaaaaatgcccatctacatcaaaaattcaagaggccta

SEQ ID NO: 91390 - DNA, 40 bp, Homo sapiens
aggcctcttgaatttttgatgtagatgggcatttttttaa

SEQ ID NO: 91391 - DNA, 40 bp, Homo sapiens
ttaaaaaaatgcccatctacatcaaaaattcaagaggcct

SEQ ID NO: 91392 - DNA, 40 bp, Homo sapiens
ggcctcttgaatttttgatgtagatgggcatttttttaag

SEQ ID NO: 91393 - DNA, 40 bp, Homo sapiens
cttaaaaaaatgcccatctacatcaaaaattcaagaggcc

SEQ ID NO: 91394 - DNA, 40 bp, Homo sapiens
gcctcttgaatttttgatgtagatgggcatttttttaagg

SEQ ID NO: 91395 - DNA, 40 bp, Homo sapiens
ccttaaaaaaatgcccatctacatcaaaaattcaagaggc

SEQ ID NO: 91396 - DNA, 40 bp, Homo sapiens
cctcttgaatttttgatgtagatgggcatttttttaaggt

SEQ ID NO: 91397 - DNA, 40 bp, Homo sapiens
accttaaaaaaatgcccatctacatcaaaaattcaagagg

SEQ ID NO: 91398 - DNA, 40 bp, Homo sapiens
ctcttgaatttttgatgtagatgggcatttttttaaggta

SEQ ID NO: 91399 - DNA, 40 bp, Homo sapiens
taccttaaaaaaatgcccatctacatcaaaaattcaagag

SEQ ID NO: 91400 - DNA, 40 bp, Homo sapiens
tcttgaatttttgatgtagatgggcatttttttaaggtag

SEQ ID NO: 91401 - DNA, 40 bp, Homo sapiens
ctaccttaaaaaaatgcccatctacatcaaaaattcaaga

SEQ ID NO: 91402 - DNA, 40 bp, Homo sapiens
cttgaatttttgatgtagatgggcatttttttaaggtagt

SEQ ID NO: 91403 - DNA, 40 bp, Homo sapiens
actaccttaaaaaaatgcccatctacatcaaaaattcaag

SEQ ID NO: 91404 - DNA, 40 bp, Homo sapiens
ttgaatttttgatgtagatgggcatttttttaaggtagtg

SEQ ID NO: 91405 - DNA, 40 bp, Homo sapiens
cactaccttaaaaaaatgcccatctacatcaaaaattcaa

SEQ ID NO: 91406 - DNA, 40 bp, Homo sapiens
tgaatttttgatgtagatgggcatttttttaaggtagtgg

SEQ ID NO: 91407 - DNA, 40 bp, Homo sapiens
ccactaccttaaaaaaatgcccatctacatcaaaaattca

SEQ ID NO: 91408 - DNA, 40 bp, Homo sapiens
gaatttttgatgtagatgggcatttttttaaggtagtggt

SEQ ID NO: 91409 - DNA, 40 bp, Homo sapiens
accactaccttaaaaaaatgcccatctacatcaaaaattc

SEQ ID NO: 91410 - DNA, 40 bp, Homo sapiens
aatttttgatgtagatgggcatttttttaaggtagtggtt

SEQ ID NO: 91411 - DNA, 40 bp, Homo sapiens
aaccactaccttaaaaaaatgcccatctacatcaaaaatt

SEQ ID NO: 91412 - DNA, 40 bp, Homo sapiens
atttttgatgtagatgggcatttttttaaggtagtggtta

SEQ ID NO: 91413 - DNA, 40 bp, Homo sapiens
taaccactaccttaaaaaaatgcccatctacatcaaaaat

SEQ ID NO: 91414 - DNA, 40 bp, Homo sapiens
tttttgatgtagatgggcatttttttaaggtagtggttaa

SEQ ID NO: 91415 - DNA, 40 bp, Homo sapiens
ttaaccactaccttaaaaaaatgcccatctacatcaaaaa

SEQ ID NO: 91416 - DNA, 40 bp, Homo sapiens
ttttgatgtagatgggcatttttttaaggtagtggttaat

SEQ ID NO: 91417 - DNA, 40 bp, Homo sapiens
attaaccactaccttaaaaaaatgcccatctacatcaaaa

SEQ ID NO: 91418 - DNA, 40 bp, Homo sapiens
tttgatgtagatgggcatttttttaaggtagtggttaatt

SEQ ID NO: 91419 - DNA, 40 bp, Homo sapiens
aattaaccactaccttaaaaaaatgcccatctacatcaaa

SEQ ID NO: 91420 - DNA, 40 bp, Homo sapiens
ttgatgtagatgggcatttttttaaggtagtggttaatta

SEQ ID NO: 91421 - DNA, 40 bp, Homo sapiens
taattaaccactaccttaaaaaaatgcccatctacatcaa

SEQ ID NO: 91422 - DNA, 40 bp, Homo sapiens
tgatgtagatgggcatttttttaaggtagtggttaattac

SEQ ID NO: 91423 - DNA, 40 bp, Homo sapiens
gtaattaaccactaccttaaaaaaatgcccatctacatca

SEQ ID NO: 91424 - DNA, 40 bp, Homo sapiens
gatgtagatgggcatttttttaaggtagtggttaattacc

SEQ ID NO: 91425 - DNA, 40 bp, Homo sapiens
ggtaattaaccactaccttaaaaaaatgcccatctacatc

SEQ ID NO: 91426 - DNA, 40 bp, Homo sapiens
atgtagatgggcatttttttaaggtagtggttaattacct

SEQ ID NO: 91427 - DNA, 40 bp, Homo sapiens
aggtaattaaccactaccttaaaaaaatgcccatctacat

SEQ ID NO: 91428 - DNA, 40 bp, Homo sapiens
tgtagatgggcatttttttaaggtagtggttaattacctt

SEQ ID NO: 91429 - DNA, 40 bp, Homo sapiens
aaggtaattaaccactaccttaaaaaaatgcccatctaca

SEQ ID NO: 91430 - DNA, 40 bp, Homo sapiens
gtagatgggcatttttttaaggtagtggttaattaccttt

SEQ ID NO: 91431 - DNA, 40 bp, Homo sapiens
aaaggtaattaaccactaccttaaaaaaatgcccatctac

SEQ ID NO: 91432 - DNA, 40 bp, Homo sapiens
tagatgggcatttttttaaggtagtggttaattaccttta

SEQ ID NO: 91433 - DNA, 40 bp, Homo sapiens
taaaggtaattaaccactaccttaaaaaaatgcccatcta

SEQ ID NO: 91434 - DNA, 40 bp, Homo sapiens
agatgggcatttttttaaggtagtggttaattacctttat

SEQ ID NO: 91435 - DNA, 40 bp, Homo sapiens
ataaaggtaattaaccactaccttaaaaaaatgcccatct

SEQ ID NO: 91436 - DNA, 40 bp, Homo sapiens
gatgggcatttttttaaggtagtggttaattacctttatg

SEQ ID NO: 91437 - DNA, 40 bp, Homo sapiens
cataaaggtaattaaccactaccttaaaaaaatgcccatc

SEQ ID NO: 91438 - DNA, 40 bp, Homo sapiens
atgggcatttttttaaggtagtggttaattacctttatgt

SEQ ID NO: 91439 - DNA, 40 bp, Homo sapiens
acataaaggtaattaaccactaccttaaaaaaatgcccat

SEQ ID NO: 91440 - DNA, 40 bp, Homo sapiens
tgggcatttttttaaggtagtggttaattacctttatgtg

SEQ ID NO: 91441 - DNA, 40 bp, Homo sapiens
cacataaaggtaattaaccactaccttaaaaaaatgccca

SEQ ID NO: 91442 - DNA, 40 bp, Homo sapiens
gggcatttttttaaggtagtggttaattacctttatgtga

SEQ ID NO: 91443 - DNA, 40 bp, Homo sapiens
tcacataaaggtaattaaccactaccttaaaaaaatgccc

SEQ ID NO: 91444 - DNA, 40 bp, Homo sapiens
ggcatttttttaaggtagtggttaattacctttatgtgaa

SEQ ID NO: 91445 - DNA, 40 bp, Homo sapiens
ttcacataaaggtaattaaccactaccttaaaaaaatgcc

SEQ ID NO: 91446 - DNA, 40 bp, Homo sapiens
gcatttttttaaggtagtggttaattacctttatgtgaac

SEQ ID NO: 91447 - DNA, 40 bp, Homo sapiens
gttcacataaaggtaattaaccactaccttaaaaaaatgc

SEQ ID NO: 91448 - DNA, 40 bp, Homo sapiens
catttttttaaggtagtggttaattacctttatgtgaact

SEQ ID NO: 91449 - DNA, 40 bp, Homo sapiens
agttcacataaaggtaattaaccactaccttaaaaaaatg

SEQ ID NO: 91450 - DNA, 40 bp, Homo sapiens
atttttttaaggtagtggttaattacctttatgtgaactt

SEQ ID NO: 91451 - DNA, 40 bp, Homo sapiens
aagttcacataaaggtaattaaccactaccttaaaaaaat

SEQ ID NO: 91452 - DNA, 40 bp, Homo sapiens
tttttttaaggtagtggttaattacctttatgtgaacttt

SEQ ID NO: 91453 - DNA, 40 bp, Homo sapiens
aaagttcacataaaggtaattaaccactaccttaaaaaaa

SEQ ID NO: 91454 - DNA, 40 bp, Homo sapiens
ttttttaaggtagtggttaattacctttatgtgaactttg

SEQ ID NO: 91455 - DNA, 40 bp, Homo sapiens
caaagttcacataaaggtaattaaccactaccttaaaaaa

SEQ ID NO: 91456 - DNA, 40 bp, Homo sapiens
tttttaaggtagtggttaattacctttatgtgaactttga

SEQ ID NO: 91457 - DNA, 40 bp, Homo sapiens
tcaaagttcacataaaggtaattaaccactaccttaaaaa

SEQ ID NO: 91458 - DNA, 40 bp, Homo sapiens
ttttaaggtagtggttaattacctttatgtgaactttgaa

SEQ ID NO: 91459 - DNA, 40 bp, Homo sapiens
ttcaaagttcacataaaggtaattaaccactaccttaaaa

SEQ ID NO: 91460 - DNA, 40 bp, Homo sapiens
tttaaggtagtggttaattacctttatgtgaactttgaat

SEQ ID NO: 91461 - DNA, 40 bp, Homo sapiens
attcaaagttcacataaaggtaattaaccactaccttaaa

SEQ ID NO: 91462 - DNA, 40 bp, Homo sapiens
ttaaggtagtggttaattacctttatgtgaactttgaatg

SEQ ID NO: 91463 - DNA, 40 bp, Homo sapiens
cattcaaagttcacataaaggtaattaaccactaccttaa

SEQ ID NO: 91464 - DNA, 40 bp, Homo sapiens
taaggtagtggttaattacctttatgtgaactttgaatgg

SEQ ID NO: 91465 - DNA, 40 bp, Homo sapiens
ccattcaaagttcacataaaggtaattaaccactacctta

SEQ ID NO: 91466 - DNA, 40 bp, Homo sapiens
aaggtagtggttaattacctttatgtgaactttgaatggt

SEQ ID NO: 91467 - DNA, 40 bp, Homo sapiens
accattcaaagttcacataaaggtaattaaccactacctt

SEQ ID NO: 91468 - DNA, 40 bp, Homo sapiens
aggtagtggttaattacctttatgtgaactttgaatggtt

SEQ ID NO: 91469 - DNA, 40 bp, Homo sapiens
aaccattcaaagttcacataaaggtaattaaccactacct

SEQ ID NO: 91470 - DNA, 40 bp, Homo sapiens
ggtagtggttaattacctttatgtgaactttgaatggttt

SEQ ID NO: 91471 - DNA, 40 bp, Homo sapiens
aaaccattcaaagttcacataaaggtaattaaccactacc

SEQ ID NO: 91472 - DNA, 40 bp, Homo sapiens
gtagtggttaattacctttatgtgaactttgaatggttta

SEQ ID NO: 91473 - DNA, 40 bp, Homo sapiens
taaaccattcaaagttcacataaaggtaattaaccactac

SEQ ID NO: 91474 - DNA, 40 bp, Homo sapiens
tagtggttaattacctttatgtgaactttgaatggtttaa

SEQ ID NO: 91475 - DNA, 40 bp, Homo sapiens
ttaaaccattcaaagttcacataaaggtaattaaccacta

SEQ ID NO: 91476 - DNA, 40 bp, Homo sapiens
agtggttaattacctttatgtgaactttgaatggtttaac

SEQ ID NO: 91477 - DNA, 40 bp, Homo sapiens
gttaaaccattcaaagttcacataaaggtaattaaccact

SEQ ID NO: 91478 - DNA, 40 bp, Homo sapiens
gtggttaattacctttatgtgaactttgaatggtttaaca

SEQ ID NO: 91479 - DNA, 40 bp, Homo sapiens
tgttaaaccattcaaagttcacataaaggtaattaaccac

SEQ ID NO: 91480 - DNA, 40 bp, Homo sapiens
tggttaattacctttatgtgaactttgaatggtttaacaa

SEQ ID NO: 91481 - DNA, 40 bp, Homo sapiens
ttgttaaaccattcaaagttcacataaaggtaattaacca

SEQ ID NO: 91482 - DNA, 40 bp, Homo sapiens
ggttaattacctttatgtgaactttgaatggtttaacaaa

SEQ ID NO: 91483 - DNA, 40 bp, Homo sapiens
tttgttaaaccattcaaagttcacataaaggtaattaacc

SEQ ID NO: 91484 - DNA, 40 bp, Homo sapiens
gttaattacctttatgtgaactttgaatggtttaacaaaa

SEQ ID NO: 91485 - DNA, 40 bp, Homo sapiens
ttttgttaaaccattcaaagttcacataaaggtaattaac

SEQ ID NO: 91486 - DNA, 40 bp, Homo sapiens
ttaattacctttatgtgaactttgaatggtttaacaaaag

SEQ ID NO: 91487 - DNA, 40 bp, Homo sapiens
cttttgttaaaccattcaaagttcacataaaggtaattaa

SEQ ID NO: 91488 - DNA, 40 bp, Homo sapiens
taattacctttatgtgaactttgaatggtttaacaaaaga

SEQ ID NO: 91489 - DNA, 40 bp, Homo sapiens
tcttttgttaaaccattcaaagttcacataaaggtaatta

SEQ ID NO: 91490 - DNA, 40 bp, Homo sapiens
aattacctttatgtgaactttgaatggtttaacaaaagat

SEQ ID NO: 91491 - DNA, 40 bp, Homo sapiens
atcttttgttaaaccattcaaagttcacataaaggtaatt

SEQ ID NO: 91492 - DNA, 40 bp, Homo sapiens
attacctttatgtgaactttgaatggtttaacaaaagatt

SEQ ID NO: 91493 - DNA, 40 bp, Homo sapiens
aatcttttgttaaaccattcaaagttcacataaaggtaat

SEQ ID NO: 91494 - DNA, 40 bp, Homo sapiens
ttacctttatgtgaactttgaatggtttaacaaaagattt

SEQ ID NO: 91495 - DNA, 40 bp, Homo sapiens
aaatcttttgttaaaccattcaaagttcacataaaggtaa

SEQ ID NO: 91496 - DNA, 40 bp, Homo sapiens
tacctttatgtgaactttgaatggtttaacaaaagatttg

SEQ ID NO: 91497 - DNA, 40 bp, Homo sapiens
caaatcttttgttaaaccattcaaagttcacataaaggta

SEQ ID NO: 91498 - DNA, 40 bp, Homo sapiens
acctttatgtgaactttgaatggtttaacaaaagatttgt

SEQ ID NO: 91499 - DNA, 40 bp, Homo sapiens
acaaatcttttgttaaaccattcaaagttcacataaaggt

SEQ ID NO: 91500 - DNA, 40 bp, Homo sapiens
cctttatgtgaactttgaatggtttaacaaaagatttgtt

SEQ ID NO: 91501 - DNA, 40 bp, Homo sapiens
aacaaatcttttgttaaaccattcaaagttcacataaagg

SEQ ID NO: 91502 - DNA, 40 bp, Homo sapiens
ctttatgtgaactttgaatggtttaacaaaagatttgttt

SEQ ID NO: 91503 - DNA, 40 bp, Homo sapiens
aaacaaatcttttgttaaaccattcaaagttcacataaag

SEQ ID NO: 91504 - DNA, 40 bp, Homo sapiens
tttatgtgaactttgaatggtttaacaaaagatttgtttt

SEQ ID NO: 91505 - DNA, 40 bp, Homo sapiens
aaaacaaatcttttgttaaaccattcaaagttcacataaa

SEQ ID NO: 91506 - DNA, 40 bp, Homo sapiens
ttatgtgaactttgaatggtttaacaaaagatttgttttt

SEQ ID NO: 91507 - DNA, 40 bp, Homo sapiens
aaaaacaaatcttttgttaaaccattcaaagttcacataa

SEQ ID NO: 91508 - DNA, 40 bp, Homo sapiens
tatgtgaactttgaatggtttaacaaaagatttgtttttg

SEQ ID NO: 91509 - DNA, 40 bp, Homo sapiens
caaaaacaaatcttttgttaaaccattcaaagttcacata

SEQ ID NO: 91510 - DNA, 40 bp, Homo sapiens
atgtgaactttgaatggtttaacaaaagatttgtttttgt

SEQ ID NO: 91511 - DNA, 40 bp, Homo sapiens
acaaaaacaaatcttttgttaaaccattcaaagttcacat

SEQ ID NO: 91512 - DNA, 40 bp, Homo sapiens
tgtgaactttgaatggtttaacaaaagatttgtttttgta

SEQ ID NO: 91513 - DNA, 40 bp, Homo sapiens
tacaaaaacaaatcttttgttaaaccattcaaagttcaca

SEQ ID NO: 91514 - DNA, 40 bp, Homo sapiens
gtgaactttgaatggtttaacaaaagatttgtttttgtag

SEQ ID NO: 91515 - DNA, 40 bp, Homo sapiens
ctacaaaaacaaatcttttgttaaaccattcaaagttcac

SEQ ID NO: 91516 - DNA, 40 bp, Homo sapiens
tgaactttgaatggtttaacaaaagatttgtttttgtaga

SEQ ID NO: 91517 - DNA, 40 bp, Homo sapiens
tctacaaaaacaaatcttttgttaaaccattcaaagttca

SEQ ID NO: 91518 - DNA, 40 bp, Homo sapiens
gaactttgaatggtttaacaaaagatttgtttttgtagag

SEQ ID NO: 91519 - DNA, 40 bp, Homo sapiens
ctctacaaaaacaaatcttttgttaaaccattcaaagttc

SEQ ID NO: 91520 - DNA, 40 bp, Homo sapiens
aactttgaatggtttaacaaaagatttgtttttgtagaga

SEQ ID NO: 91521 - DNA, 40 bp, Homo sapiens
tctctacaaaaacaaatcttttgttaaaccattcaaagtt

SEQ ID NO: 91522 - DNA, 40 bp, Homo sapiens
actttgaatggtttaacaaaagatttgtttttgtagagat

SEQ ID NO: 91523 - DNA, 40 bp, Homo sapiens
atctctacaaaaacaaatcttttgttaaaccattcaaagt

SEQ ID NO: 91524 - DNA, 40 bp, Homo sapiens
ctttgaatggtttaacaaaagatttgtttttgtagagatt

SEQ ID NO: 91525 - DNA, 40 bp, Homo sapiens
aatctctacaaaaacaaatcttttgttaaaccattcaaag

SEQ ID NO: 91526 - DNA, 40 bp, Homo sapiens
tttgaatggtttaacaaaagatttgtttttgtagagattt

SEQ ID NO: 91527 - DNA, 40 bp, Homo sapiens
aaatctctacaaaaacaaatcttttgttaaaccattcaaa

SEQ ID NO: 91528 - DNA, 40 bp, Homo sapiens
ttgaatggtttaacaaaagatttgtttttgtagagatttt

SEQ ID NO: 91529 - DNA, 40 bp, Homo sapiens
aaaatctctacaaaaacaaatcttttgttaaaccattcaa

SEQ ID NO: 91530 - DNA, 40 bp, Homo sapiens
tgaatggtttaacaaaagatttgtttttgtagagatttta

SEQ ID NO: 91531 - DNA, 40 bp, Homo sapiens
taaaatctctacaaaaacaaatcttttgttaaaccattca

SEQ ID NO: 91532 - DNA, 40 bp, Homo sapiens
gaatggtttaacaaaagatttgtttttgtagagattttaa

SEQ ID NO: 91533 - DNA, 40 bp, Homo sapiens
ttaaaatctctacaaaaacaaatcttttgttaaaccattc

SEQ ID NO: 91534 - DNA, 40 bp, Homo sapiens
aatggtttaacaaaagatttgtttttgtagagattttaaa

SEQ ID NO: 91535 - DNA, 40 bp, Homo sapiens
tttaaaatctctacaaaaacaaatcttttgttaaaccatt

SEQ ID NO: 91536 - DNA, 40 bp, Homo sapiens
atggtttaacaaaagatttgtttttgtagagattttaaag

SEQ ID NO: 91537 - DNA, 40 bp, Homo sapiens
ctttaaaatctctacaaaaacaaatcttttgttaaaccat

SEQ ID NO: 91538 - DNA, 40 bp, Homo sapiens
tggtttaacaaaagatttgtttttgtagagattttaaagg

SEQ ID NO: 91539 - DNA, 40 bp, Homo sapiens
cctttaaaatctctacaaaaacaaatcttttgttaaacca

SEQ ID NO: 91540 - DNA, 40 bp, Homo sapiens
ggtttaacaaaagatttgtttttgtagagattttaaaggg

SEQ ID NO: 91541 - DNA, 40 bp, Homo sapiens
ccctttaaaatctctacaaaaacaaatcttttgttaaacc

SEQ ID NO: 91542 - DNA, 40 bp, Homo sapiens
gtttaacaaaagatttgtttttgtagagattttaaagggg

SEQ ID NO: 91543 - DNA, 40 bp, Homo sapiens
cccctttaaaatctctacaaaaacaaatcttttgttaaac

SEQ ID NO: 91544 - DNA, 40 bp, Homo sapiens
tttaacaaaagatttgtttttgtagagattttaaaggggg

SEQ ID NO: 91545 - DNA, 40 bp, Homo sapiens
ccccctttaaaatctctacaaaaacaaatcttttgttaaa

SEQ ID NO: 91546 - DNA, 40 bp, Homo sapiens
ttaacaaaagatttgtttttgtagagattttaaaggggga

SEQ ID NO: 91547 - DNA, 40 bp, Homo sapiens
tccccctttaaaatctctacaaaaacaaatcttttgttaa

SEQ ID NO: 91548 - DNA, 40 bp, Homo sapiens
taacaaaagatttgtttttgtagagattttaaagggggag

SEQ ID NO: 91549 - DNA, 40 bp, Homo sapiens
ctccccctttaaaatctctacaaaaacaaatcttttgtta

SEQ ID NO: 91550 - DNA, 40 bp, Homo sapiens
aacaaaagatttgtttttgtagagattttaaagggggaga

SEQ ID NO: 91551 - DNA, 40 bp, Homo sapiens
tctccccctttaaaatctctacaaaaacaaatcttttgtt

SEQ ID NO: 91552 - DNA, 40 bp, Homo sapiens
acaaaagatttgtttttgtagagattttaaagggggagaa

SEQ ID NO: 91553 - DNA, 40 bp, Homo sapiens
ttctccccctttaaaatctctacaaaaacaaatcttttgt

SEQ ID NO: 91554 - DNA, 40 bp, Homo sapiens
caaaagatttgtttttgtagagattttaaagggggagaat

SEQ ID NO: 91555 - DNA, 40 bp, Homo sapiens
attctccccctttaaaatctctacaaaaacaaatcttttg

SEQ ID NO: 91556 - DNA, 40 bp, Homo sapiens
aaaagatttgtttttgtagagattttaaagggggagaatt

SEQ ID NO: 91557 - DNA, 40 bp, Homo sapiens
aattctccccctttaaaatctctacaaaaacaaatctttt

SEQ ID NO: 91558 - DNA, 40 bp, Homo sapiens
aaagatttgtttttgtagagattttaaagggggagaattc

SEQ ID NO: 91559 - DNA, 40 bp, Homo sapiens
gaattctccccctttaaaatctctacaaaaacaaatcttt

SEQ ID NO: 91560 - DNA, 40 bp, Homo sapiens
aagatttgtttttgtagagattttaaagggggagaattct

SEQ ID NO: 91561 - DNA, 40 bp, Homo sapiens
agaattctccccctttaaaatctctacaaaaacaaatctt

SEQ ID NO: 91562 - DNA, 40 bp, Homo sapiens
agatttgtttttgtagagattttaaagggggagaattcta

SEQ ID NO: 91563 - DNA, 40 bp, Homo sapiens
tagaattctccccctttaaaatctctacaaaaacaaatct

SEQ ID NO: 91564 - DNA, 40 bp, Homo sapiens
gatttgtttttgtagagattttaaagggggagaattctag

SEQ ID NO: 91565 - DNA, 40 bp, Homo sapiens
ctagaattctccccctttaaaatctctacaaaaacaaatc

SEQ ID NO: 91566 - DNA, 40 bp, Homo sapiens
atttgtttttgtagagattttaaagggggagaattctaga

SEQ ID NO: 91567 - DNA, 40 bp, Homo sapiens
tctagaattctccccctttaaaatctctacaaaaacaaat

SEQ ID NO: 91568 - DNA, 40 bp, Homo sapiens
tttgtttttgtagagattttaaagggggagaattctagaa

SEQ ID NO: 91569 - DNA, 40 bp, Homo sapiens
ttctagaattctccccctttaaaatctctacaaaaacaaa

SEQ ID NO: 91570 - DNA, 40 bp, Homo sapiens
ttgtttttgtagagattttaaagggggagaattctagaaa

SEQ ID NO: 91571 - DNA, 40 bp, Homo sapiens
tttctagaattctccccctttaaaatctctacaaaaacaa

SEQ ID NO: 91572 - DNA, 40 bp, Homo sapiens
tgtttttgtagagattttaaagggggagaattctagaaat

SEQ ID NO: 91573 - DNA, 40 bp, Homo sapiens
atttctagaattctccccctttaaaatctctacaaaaaca

SEQ ID NO: 91574 - DNA, 40 bp, Homo sapiens
gtttttgtagagattttaaagggggagaattctagaaata

SEQ ID NO: 91575 - DNA, 40 bp, Homo sapiens
tatttctagaattctccccctttaaaatctctacaaaaac

SEQ ID NO: 91576 - DNA, 40 bp, Homo sapiens
tttttgtagagattttaaagggggagaattctagaaataa

SEQ ID NO: 91577 - DNA, 40 bp, Homo sapiens
ttatttctagaattctccccctttaaaatctctacaaaaa

SEQ ID NO: 91578 - DNA, 40 bp, Homo sapiens
ttttgtagagattttaaagggggagaattctagaaataaa

SEQ ID NO: 91579 - DNA, 40 bp, Homo sapiens
tttatttctagaattctccccctttaaaatctctacaaaa

SEQ ID NO: 91580 - DNA, 40 bp, Homo sapiens
tttgtagagattttaaagggggagaattctagaaataaat

SEQ ID NO: 91581 - DNA, 40 bp, Homo sapiens
atttatttctagaattctccccctttaaaatctctacaaa

SEQ ID NO: 91582 - DNA, 40 bp, Homo sapiens
ttgtagagattttaaagggggagaattctagaaataaatg

SEQ ID NO: 91583 - DNA, 40 bp, Homo sapiens
catttatttctagaattctccccctttaaaatctctacaa

SEQ ID NO: 91584 - DNA, 40 bp, Homo sapiens
tgtagagattttaaagggggagaattctagaaataaatgt

SEQ ID NO: 91585 - DNA, 40 bp, Homo sapiens
acatttatttctagaattctccccctttaaaatctctaca

SEQ ID NO: 91586 - DNA, 40 bp, Homo sapiens
gtagagattttaaagggggagaattctagaaataaatgtt

SEQ ID NO: 91587 - DNA, 40 bp, Homo sapiens
aacatttatttctagaattctccccctttaaaatctctac

SEQ ID NO: 91588 - DNA, 40 bp, Homo sapiens
tagagattttaaagggggagaattctagaaataaatgtta

SEQ ID NO: 91589 - DNA, 40 bp, Homo sapiens
taacatttatttctagaattctccccctttaaaatctcta

SEQ ID NO: 91590 - DNA, 40 bp, Homo sapiens
agagattttaaagggggagaattctagaaataaatgttac

SEQ ID NO: 91591 - DNA, 40 bp, Homo sapiens
gtaacatttatttctagaattctccccctttaaaatctct

SEQ ID NO: 91592 - DNA, 40 bp, Homo sapiens
gagattttaaagggggagaattctagaaataaatgttacc

SEQ ID NO: 91593 - DNA, 40 bp, Homo sapiens
ggtaacatttatttctagaattctccccctttaaaatctc

SEQ ID NO: 91594 - DNA, 40 bp, Homo sapiens
agattttaaagggggagaattctagaaataaatgttacct

SEQ ID NO: 91595 - DNA, 40 bp, Homo sapiens
aggtaacatttatttctagaattctccccctttaaaatct

SEQ ID NO: 91596 - DNA, 40 bp, Homo sapiens
gattttaaagggggagaattctagaaataaatgttaccta

SEQ ID NO: 91597 - DNA, 40 bp, Homo sapiens
taggtaacatttatttctagaattctccccctttaaaatc

SEQ ID NO: 91598 - DNA, 40 bp, Homo sapiens
attttaaagggggagaattctagaaataaatgttacctaa

SEQ ID NO: 91599 - DNA, 40 bp, Homo sapiens
ttaggtaacatttatttctagaattctccccctttaaaat

SEQ ID NO: 91600 - DNA, 40 bp, Homo sapiens
ttttaaagggggagaattctagaaataaatgttacctaat

SEQ ID NO: 91601 - DNA, 40 bp, Homo sapiens
attaggtaacatttatttctagaattctccccctttaaaa

SEQ ID NO: 91602 - DNA, 40 bp, Homo sapiens
tttaaagggggagaattctagaaataaatgttacctaatt

SEQ ID NO: 91603 - DNA, 40 bp, Homo sapiens
aattaggtaacatttatttctagaattctccccctttaaa

SEQ ID NO: 91604 - DNA, 40 bp, Homo sapiens
ttaaagggggagaattctagaaataaatgttacctaatta

SEQ ID NO: 91605 - DNA, 40 bp, Homo sapiens
taattaggtaacatttatttctagaattctccccctttaa

SEQ ID NO: 91606 - DNA, 40 bp, Homo sapiens
taaagggggagaattctagaaataaatgttacctaattat

SEQ ID NO: 91607 - DNA, 40 bp, Homo sapiens
ataattaggtaacatttatttctagaattctcccccttta

SEQ ID NO: 91608 - DNA, 40 bp, Homo sapiens
aaagggggagaattctagaaataaatgttacctaattatt

SEQ ID NO: 91609 - DNA, 40 bp, Homo sapiens
aataattaggtaacatttatttctagaattctcccccttt

SEQ ID NO: 91610 - DNA, 40 bp, Homo sapiens
aagggggagaattctagaaataaatgttacctaattatta

SEQ ID NO: 91611 - DNA, 40 bp, Homo sapiens
taataattaggtaacatttatttctagaattctccccctt

SEQ ID NO: 91612 - DNA, 40 bp, Homo sapiens
agggggagaattctagaaataaatgttacctaattattac

SEQ ID NO: 91613 - DNA, 40 bp, Homo sapiens
gtaataattaggtaacatttatttctagaattctccccct

SEQ ID NO: 91614 - DNA, 40 bp, Homo sapiens
gggggagaattctagaaataaatgttacctaattattaca

SEQ ID NO: 91615 - DNA, 40 bp, Homo sapiens
tgtaataattaggtaacatttatttctagaattctccccc

SEQ ID NO: 91616 - DNA, 40 bp, Homo sapiens
ggggagaattctagaaataaatgttacctaattattacag

SEQ ID NO: 91617 - DNA, 40 bp, Homo sapiens
ctgtaataattaggtaacatttatttctagaattctcccc

SEQ ID NO: 91618 - DNA, 40 bp, Homo sapiens
gggagaattctagaaataaatgttacctaattattacagc

SEQ ID NO: 91619 - DNA, 40 bp, Homo sapiens
gctgtaataattaggtaacatttatttctagaattctccc

SEQ ID NO: 91620 - DNA, 40 bp, Homo sapiens
ggagaattctagaaataaatgttacctaattattacagcc

SEQ ID NO: 91621 - DNA, 40 bp, Homo sapiens
ggctgtaataattaggtaacatttatttctagaattctcc

SEQ ID NO: 91622 - DNA, 40 bp, Homo sapiens
gagaattctagaaataaatgttacctaattattacagcct

SEQ ID NO: 91623 - DNA, 40 bp, Homo sapiens
aggctgtaataattaggtaacatttatttctagaattctc

SEQ ID NO: 91624 - DNA, 40 bp, Homo sapiens
agaattctagaaataaatgttacctaattattacagcctt

SEQ ID NO: 91625 - DNA, 40 bp, Homo sapiens
aaggctgtaataattaggtaacatttatttctagaattct

SEQ ID NO: 91626 - DNA, 40 bp, Homo sapiens
gaattctagaaataaatgttacctaattattacagcctta

SEQ ID NO: 91627 - DNA, 40 bp, Homo sapiens
taaggctgtaataattaggtaacatttatttctagaattc

SEQ ID NO: 91628 - DNA, 40 bp, Homo sapiens
aattctagaaataaatgttacctaattattacagccttaa

SEQ ID NO: 91629 - DNA, 40 bp, Homo sapiens
ttaaggctgtaataattaggtaacatttatttctagaatt

SEQ ID NO: 91630 - DNA, 40 bp, Homo sapiens
attctagaaataaatgttacctaattattacagccttaaa

SEQ ID NO: 91631 - DNA, 40 bp, Homo sapiens
tttaaggctgtaataattaggtaacatttatttctagaat

SEQ ID NO: 91632 - DNA, 40 bp, Homo sapiens
ttctagaaataaatgttacctaattattacagccttaaag

SEQ ID NO: 91633 - DNA, 40 bp, Homo sapiens
ctttaaggctgtaataattaggtaacatttatttctagaa

SEQ ID NO: 91634 - DNA, 40 bp, Homo sapiens
tctagaaataaatgttacctaattattacagccttaaaga

SEQ ID NO: 91635 - DNA, 40 bp, Homo sapiens
tctttaaggctgtaataattaggtaacatttatttctaga

SEQ ID NO: 91636 - DNA, 40 bp, Homo sapiens
ctagaaataaatgttacctaattattacagccttaaagac

SEQ ID NO: 91637 - DNA, 40 bp, Homo sapiens
gtctttaaggctgtaataattaggtaacatttatttctag

SEQ ID NO: 91638 - DNA, 40 bp, Homo sapiens
tagaaataaatgttacctaattattacagccttaaagaca

SEQ ID NO: 91639 - DNA, 40 bp, Homo sapiens
tgtctttaaggctgtaataattaggtaacatttatttcta

SEQ ID NO: 91640 - DNA, 40 bp, Homo sapiens
agaaataaatgttacctaattattacagccttaaagacaa

SEQ ID NO: 91641 - DNA, 40 bp, Homo sapiens
ttgtctttaaggctgtaataattaggtaacatttatttct

SEQ ID NO: 91642 - DNA, 40 bp, Homo sapiens
gaaataaatgttacctaattattacagccttaaagacaaa

SEQ ID NO: 91643 - DNA, 40 bp, Homo sapiens
tttgtctttaaggctgtaataattaggtaacatttatttc

SEQ ID NO: 91644 - DNA, 40 bp, Homo sapiens
aaataaatgttacctaattattacagccttaaagacaaaa

SEQ ID NO: 91645 - DNA, 40 bp, Homo sapiens
ttttgtctttaaggctgtaataattaggtaacatttattt

SEQ ID NO: 91646 - DNA, 40 bp, Homo sapiens
aataaatgttacctaattattacagccttaaagacaaaaa

SEQ ID NO: 91647 - DNA, 40 bp, Homo sapiens
tttttgtctttaaggctgtaataattaggtaacatttatt

SEQ ID NO: 91648 - DNA, 40 bp, Homo sapiens
ataaatgttacctaattattacagccttaaagacaaaaat

SEQ ID NO: 91649 - DNA, 40 bp, Homo sapiens
atttttgtctttaaggctgtaataattaggtaacatttat

SEQ ID NO: 91650 - DNA, 40 bp, Homo sapiens
taaatgttacctaattattacagccttaaagacaaaaatc

SEQ ID NO: 91651 - DNA, 40 bp, Homo sapiens
gatttttgtctttaaggctgtaataattaggtaacattta

SEQ ID NO: 91652 - DNA, 40 bp, Homo sapiens
aaatgttacctaattattacagccttaaagacaaaaatcc

SEQ ID NO: 91653 - DNA, 40 bp, Homo sapiens
ggatttttgtctttaaggctgtaataattaggtaacattt

SEQ ID NO: 91654 - DNA, 40 bp, Homo sapiens
aatgttacctaattattacagccttaaagacaaaaatcct

SEQ ID NO: 91655 - DNA, 40 bp, Homo sapiens
aggatttttgtctttaaggctgtaataattaggtaacatt

SEQ ID NO: 91656 - DNA, 40 bp, Homo sapiens
atgttacctaattattacagccttaaagacaaaaatcctt

SEQ ID NO: 91657 - DNA, 40 bp, Homo sapiens
aaggatttttgtctttaaggctgtaataattaggtaacat

SEQ ID NO: 91658 - DNA, 40 bp, Homo sapiens
tgttacctaattattacagccttaaagacaaaaatccttg

SEQ ID NO: 91659 - DNA, 40 bp, Homo sapiens
caaggatttttgtctttaaggctgtaataattaggtaaca

SEQ ID NO: 91660 - DNA, 40 bp, Homo sapiens
gttacctaattattacagccttaaagacaaaaatccttgt

SEQ ID NO: 91661 - DNA, 40 bp, Homo sapiens
acaaggatttttgtctttaaggctgtaataattaggtaac

SEQ ID NO: 91662 - DNA, 40 bp, Homo sapiens
ttacctaattattacagccttaaagacaaaaatccttgtt

SEQ ID NO: 91663 - DNA, 40 bp, Homo sapiens
aacaaggatttttgtctttaaggctgtaataattaggtaa

SEQ ID NO: 91664 - DNA, 40 bp, Homo sapiens
tacctaattattacagccttaaagacaaaaatccttgttg

SEQ ID NO: 91665 - DNA, 40 bp, Homo sapiens
caacaaggatttttgtctttaaggctgtaataattaggta

SEQ ID NO: 91666 - DNA, 40 bp, Homo sapiens
acctaattattacagccttaaagacaaaaatccttgttga

SEQ ID NO: 91667 - DNA, 40 bp, Homo sapiens
tcaacaaggatttttgtctttaaggctgtaataattaggt

SEQ ID NO: 91668 - DNA, 40 bp, Homo sapiens
cctaattattacagccttaaagacaaaaatccttgttgaa

SEQ ID NO: 91669 - DNA, 40 bp, Homo sapiens
ttcaacaaggatttttgtctttaaggctgtaataattagg

SEQ ID NO: 91670 - DNA, 40 bp, Homo sapiens
ctaattattacagccttaaagacaaaaatccttgttgaag

SEQ ID NO: 91671 - DNA, 40 bp, Homo sapiens
cttcaacaaggatttttgtctttaaggctgtaataattag

SEQ ID NO: 91672 - DNA, 40 bp, Homo sapiens
taattattacagccttaaagacaaaaatccttgttgaagt

SEQ ID NO: 91673 - DNA, 40 bp, Homo sapiens
acttcaacaaggatttttgtctttaaggctgtaataatta

SEQ ID NO: 91674 - DNA, 40 bp, Homo sapiens
aattattacagccttaaagacaaaaatccttgttgaagtt

SEQ ID NO: 91675 - DNA, 40 bp, Homo sapiens
aacttcaacaaggatttttgtctttaaggctgtaataatt

SEQ ID NO: 91676 - DNA, 40 bp, Homo sapiens
attattacagccttaaagacaaaaatccttgttgaagttt

SEQ ID NO: 91677 - DNA, 40 bp, Homo sapiens
aaacttcaacaaggatttttgtctttaaggctgtaataat

SEQ ID NO: 91678 - DNA, 40 bp, Homo sapiens
ttattacagccttaaagacaaaaatccttgttgaagtttt

SEQ ID NO: 91679 - DNA, 40 bp, Homo sapiens
aaaacttcaacaaggatttttgtctttaaggctgtaataa

SEQ ID NO: 91680 - DNA, 40 bp, Homo sapiens
tattacagccttaaagacaaaaatccttgttgaagttttt

SEQ ID NO: 91681 - DNA, 40 bp, Homo sapiens
aaaaacttcaacaaggatttttgtctttaaggctgtaata

SEQ ID NO: 91682 - DNA, 40 bp, Homo sapiens
attacagccttaaagacaaaaatccttgttgaagtttttt

SEQ ID NO: 91683 - DNA, 40 bp, Homo sapiens
aaaaaacttcaacaaggatttttgtctttaaggctgtaat

SEQ ID NO: 91684 - DNA, 40 bp, Homo sapiens
ttacagccttaaagacaaaaatccttgttgaagttttttt

SEQ ID NO: 91685 - DNA, 40 bp, Homo sapiens
aaaaaaacttcaacaaggatttttgtctttaaggctgtaa

SEQ ID NO: 91686 - DNA, 40 bp, Homo sapiens
tacagccttaaagacaaaaatccttgttgaagttttttta

SEQ ID NO: 91687 - DNA, 40 bp, Homo sapiens
taaaaaaacttcaacaaggatttttgtctttaaggctgta

SEQ ID NO: 91688 - DNA, 40 bp, Homo sapiens
acagccttaaagacaaaaatccttgttgaagtttttttaa

SEQ ID NO: 91689 - DNA, 40 bp, Homo sapiens
ttaaaaaaacttcaacaaggatttttgtctttaaggctgt

SEQ ID NO: 91690 - DNA, 40 bp, Homo sapiens
cagccttaaagacaaaaatccttgttgaagtttttttaaa

SEQ ID NO: 91691 - DNA, 40 bp, Homo sapiens
tttaaaaaaacttcaacaaggatttttgtctttaaggctg

SEQ ID NO: 91692 - DNA, 40 bp, Homo sapiens
agccttaaagacaaaaatccttgttgaagtttttttaaaa

SEQ ID NO: 91693 - DNA, 40 bp, Homo sapiens
ttttaaaaaaacttcaacaaggatttttgtctttaaggct

SEQ ID NO: 91694 - DNA, 40 bp, Homo sapiens
gccttaaagacaaaaatccttgttgaagtttttttaaaaa

SEQ ID NO: 91695 - DNA, 40 bp, Homo sapiens
tttttaaaaaaacttcaacaaggatttttgtctttaaggc

SEQ ID NO: 91696 - DNA, 40 bp, Homo sapiens
ccttaaagacaaaaatccttgttgaagtttttttaaaaaa

SEQ ID NO: 91697 - DNA, 40 bp, Homo sapiens
ttttttaaaaaaacttcaacaaggatttttgtctttaagg

SEQ ID NO: 91698 - DNA, 40 bp, Homo sapiens
cttaaagacaaaaatccttgttgaagtttttttaaaaaaa

SEQ ID NO: 91699 - DNA, 40 bp, Homo sapiens
tttttttaaaaaaacttcaacaaggatttttgtctttaag

SEQ ID NO: 91700 - DNA, 40 bp, Homo sapiens
ttaaagacaaaaatccttgttgaagtttttttaaaaaaag

SEQ ID NO: 91701 - DNA, 40 bp, Homo sapiens
ctttttttaaaaaaacttcaacaaggatttttgtctttaa

SEQ ID NO: 91702 - DNA, 40 bp, Homo sapiens
taaagacaaaaatccttgttgaagtttttttaaaaaaagc

SEQ ID NO: 91703 - DNA, 40 bp, Homo sapiens
gctttttttaaaaaaacttcaacaaggatttttgtcttta

SEQ ID NO: 91704 - DNA, 40 bp, Homo sapiens
aaagacaaaaatccttgttgaagtttttttaaaaaaagct

SEQ ID NO: 91705 - DNA, 40 bp, Homo sapiens
agctttttttaaaaaaacttcaacaaggatttttgtcttt

SEQ ID NO: 91706 - DNA, 40 bp, Homo sapiens
aagacaaaaatccttgttgaagtttttttaaaaaaagcta

SEQ ID NO: 91707 - DNA, 40 bp, Homo sapiens
tagctttttttaaaaaaacttcaacaaggatttttgtctt

SEQ ID NO: 91708 - DNA, 40 bp, Homo sapiens
agacaaaaatccttgttgaagtttttttaaaaaaagctaa

SEQ ID NO: 91709 - DNA, 40 bp, Homo sapiens
ttagctttttttaaaaaaacttcaacaaggatttttgtct

SEQ ID NO: 91710 - DNA, 40 bp, Homo sapiens
gacaaaaatccttgttgaagtttttttaaaaaaagctaaa

SEQ ID NO: 91711 - DNA, 40 bp, Homo sapiens
tttagctttttttaaaaaaacttcaacaaggatttttgtc

SEQ ID NO: 91712 - DNA, 40 bp, Homo sapiens
acaaaaatccttgttgaagtttttttaaaaaaagctaaat

SEQ ID NO: 91713 - DNA, 40 bp, Homo sapiens
atttagctttttttaaaaaaacttcaacaaggatttttgt

SEQ ID NO: 91714 - DNA, 40 bp, Homo sapiens
caaaaatccttgttgaagtttttttaaaaaaagctaaatt

SEQ ID NO: 91715 - DNA, 40 bp, Homo sapiens
aatttagctttttttaaaaaaacttcaacaaggatttttg

SEQ ID NO: 91716 - DNA, 40 bp, Homo sapiens
aaaaatccttgttgaagtttttttaaaaaaagctaaatta

SEQ ID NO: 91717 - DNA, 40 bp, Homo sapiens
taatttagctttttttaaaaaaacttcaacaaggattttt

SEQ ID NO: 91718 - DNA, 40 bp, Homo sapiens
aaaatccttgttgaagtttttttaaaaaaagctaaattac

SEQ ID NO: 91719 - DNA, 40 bp, Homo sapiens
gtaatttagctttttttaaaaaaacttcaacaaggatttt

SEQ ID NO: 91720 - DNA, 40 bp, Homo sapiens
aaatccttgttgaagtttttttaaaaaaagctaaattaca

SEQ ID NO: 91721 - DNA, 40 bp, Homo sapiens
tgtaatttagctttttttaaaaaaacttcaacaaggattt

SEQ ID NO: 91722 - DNA, 40 bp, Homo sapiens
aatccttgttgaagtttttttaaaaaaagctaaattacat

SEQ ID NO: 91723 - DNA, 40 bp, Homo sapiens
atgtaatttagctttttttaaaaaaacttcaacaaggatt

SEQ ID NO: 91724 - DNA, 40 bp, Homo sapiens
atccttgttgaagtttttttaaaaaaagctaaattacata

SEQ ID NO: 91725 - DNA, 40 bp, Homo sapiens
tatgtaatttagctttttttaaaaaaacttcaacaaggat

SEQ ID NO: 91726 - DNA, 40 bp, Homo sapiens
tccttgttgaagtttttttaaaaaaagctaaattacatag

SEQ ID NO: 91727 - DNA, 40 bp, Homo sapiens
ctatgtaatttagctttttttaaaaaaacttcaacaagga

SEQ ID NO: 91728 - DNA, 40 bp, Homo sapiens
ccttgttgaagtttttttaaaaaaagctaaattacataga

SEQ ID NO: 91729 - DNA, 40 bp, Homo sapiens
tctatgtaatttagctttttttaaaaaaacttcaacaagg

SEQ ID NO: 91730 - DNA, 40 bp, Homo sapiens
cttgttgaagtttttttaaaaaaagctaaattacatagac

SEQ ID NO: 91731 - DNA, 40 bp, Homo sapiens
gtctatgtaatttagctttttttaaaaaaacttcaacaag

SEQ ID NO: 91732 - DNA, 40 bp, Homo sapiens
ttgttgaagtttttttaaaaaaagctaaattacatagact

SEQ ID NO: 91733 - DNA, 40 bp, Homo sapiens
agtctatgtaatttagctttttttaaaaaaacttcaacaa

SEQ ID NO: 91734 - DNA, 40 bp, Homo sapiens
tgttgaagtttttttaaaaaaagctaaattacatagactt

SEQ ID NO: 91735 - DNA, 40 bp, Homo sapiens
aagtctatgtaatttagctttttttaaaaaaacttcaaca

SEQ ID NO: 91736 - DNA, 40 bp, Homo sapiens
gttgaagtttttttaaaaaaagctaaattacatagactta

SEQ ID NO: 91737 - DNA, 40 bp, Homo sapiens
taagtctatgtaatttagctttttttaaaaaaacttcaac

SEQ ID NO: 91738 - DNA, 40 bp, Homo sapiens
ttgaagtttttttaaaaaaagctaaattacatagacttag

SEQ ID NO: 91739 - DNA, 40 bp, Homo sapiens
ctaagtctatgtaatttagctttttttaaaaaaacttcaa

SEQ ID NO: 91740 - DNA, 40 bp, Homo sapiens
tgaagtttttttaaaaaaagctaaattacatagacttagg

SEQ ID NO: 91741 - DNA, 40 bp, Homo sapiens
cctaagtctatgtaatttagctttttttaaaaaaacttca

SEQ ID NO: 91742 - DNA, 40 bp, Homo sapiens
gaagtttttttaaaaaaagctaaattacatagacttaggc

SEQ ID NO: 91743 - DNA, 40 bp, Homo sapiens
gcctaagtctatgtaatttagctttttttaaaaaaacttc

SEQ ID NO: 91744 - DNA, 40 bp, Homo sapiens
aagtttttttaaaaaaagctaaattacatagacttaggca

SEQ ID NO: 91745 - DNA, 40 bp, Homo sapiens
tgcctaagtctatgtaatttagctttttttaaaaaaactt

SEQ ID NO: 91746 - DNA, 40 bp, Homo sapiens
agtttttttaaaaaaagctaaattacatagacttaggcat

SEQ ID NO: 91747 - DNA, 40 bp, Homo sapiens
atgcctaagtctatgtaatttagctttttttaaaaaaact

SEQ ID NO: 91748 - DNA, 40 bp, Homo sapiens
gtttttttaaaaaaagctaaattacatagacttaggcatt

SEQ ID NO: 91749 - DNA, 40 bp, Homo sapiens
aatgcctaagtctatgtaatttagctttttttaaaaaaac

SEQ ID NO: 91750 - DNA, 40 bp, Homo sapiens
tttttttaaaaaaagctaaattacatagacttaggcatta

SEQ ID NO: 91751 - DNA, 40 bp, Homo sapiens
taatgcctaagtctatgtaatttagctttttttaaaaaaa

SEQ ID NO: 91752 - DNA, 40 bp, Homo sapiens
ttttttaaaaaaagctaaattacatagacttaggcattaa

SEQ ID NO: 91753 - DNA, 40 bp, Homo sapiens
ttaatgcctaagtctatgtaatttagctttttttaaaaaa

SEQ ID NO: 91754 - DNA, 40 bp, Homo sapiens
tttttaaaaaaagctaaattacatagacttaggcattaac

SEQ ID NO: 91755 - DNA, 40 bp, Homo sapiens
gttaatgcctaagtctatgtaatttagctttttttaaaaa

SEQ ID NO: 91756 - DNA, 40 bp, Homo sapiens
ttttaaaaaaagctaaattacatagacttaggcattaaca

SEQ ID NO: 91757 - DNA, 40 bp, Homo sapiens
tgttaatgcctaagtctatgtaatttagctttttttaaaa

SEQ ID NO: 91758 - DNA, 40 bp, Homo sapiens
tttaaaaaaagctaaattacatagacttaggcattaacat

SEQ ID NO: 91759 - DNA, 40 bp, Homo sapiens
atgttaatgcctaagtctatgtaatttagctttttttaaa

SEQ ID NO: 91760 - DNA, 40 bp, Homo sapiens
ttaaaaaaagctaaattacatagacttaggcattaacatg

SEQ ID NO: 91761 - DNA, 40 bp, Homo sapiens
catgttaatgcctaagtctatgtaatttagctttttttaa

SEQ ID NO: 91762 - DNA, 40 bp, Homo sapiens
taaaaaaagctaaattacatagacttaggcattaacatgt

SEQ ID NO: 91763 - DNA, 40 bp, Homo sapiens
acatgttaatgcctaagtctatgtaatttagcttttttta

SEQ ID NO: 91764 - DNA, 40 bp, Homo sapiens
aaaaaaagctaaattacatagacttaggcattaacatgtt

SEQ ID NO: 91765 - DNA, 40 bp, Homo sapiens
aacatgttaatgcctaagtctatgtaatttagcttttttt

SEQ ID NO: 91766 - DNA, 40 bp, Homo sapiens
aaaaaagctaaattacatagacttaggcattaacatgttt

SEQ ID NO: 91767 - DNA, 40 bp, Homo sapiens
aaacatgttaatgcctaagtctatgtaatttagctttttt

SEQ ID NO: 91768 - DNA, 40 bp, Homo sapiens
aaaaagctaaattacatagacttaggcattaacatgtttg

SEQ ID NO: 91769 - DNA, 40 bp, Homo sapiens
caaacatgttaatgcctaagtctatgtaatttagcttttt

SEQ ID NO: 91770 - DNA, 40 bp, Homo sapiens
aaaagctaaattacatagacttaggcattaacatgtttgt

SEQ ID NO: 91771 - DNA, 40 bp, Homo sapiens
acaaacatgttaatgcctaagtctatgtaatttagctttt

SEQ ID NO: 91772 - DNA, 40 bp, Homo sapiens
aaagctaaattacatagacttaggcattaacatgtttgtg

SEQ ID NO: 91773 - DNA, 40 bp, Homo sapiens
cacaaacatgttaatgcctaagtctatgtaatttagcttt

SEQ ID NO: 91774 - DNA, 40 bp, Homo sapiens
aagctaaattacatagacttaggcattaacatgtttgtgg

SEQ ID NO: 91775 - DNA, 40 bp, Homo sapiens
ccacaaacatgttaatgcctaagtctatgtaatttagctt

SEQ ID NO: 91776 - DNA, 40 bp, Homo sapiens
agctaaattacatagacttaggcattaacatgtttgtgga

SEQ ID NO: 91777 - DNA, 40 bp, Homo sapiens
tccacaaacatgttaatgcctaagtctatgtaatttagct

SEQ ID NO: 91778 - DNA, 40 bp, Homo sapiens
gctaaattacatagacttaggcattaacatgtttgtggaa

SEQ ID NO: 91779 - DNA, 40 bp, Homo sapiens
ttccacaaacatgttaatgcctaagtctatgtaatttagc

SEQ ID NO: 91780 - DNA, 40 bp, Homo sapiens
ctaaattacatagacttaggcattaacatgtttgtggaag

SEQ ID NO: 91781 - DNA, 40 bp, Homo sapiens
cttccacaaacatgttaatgcctaagtctatgtaatttag

SEQ ID NO: 91782 - DNA, 40 bp, Homo sapiens
taaattacatagacttaggcattaacatgtttgtggaaga

SEQ ID NO: 91783 - DNA, 40 bp, Homo sapiens
tcttccacaaacatgttaatgcctaagtctatgtaattta

SEQ ID NO: 91784 - DNA, 40 bp, Homo sapiens
aaattacatagacttaggcattaacatgtttgtggaagaa

SEQ ID NO: 91785 - DNA, 40 bp, Homo sapiens
ttcttccacaaacatgttaatgcctaagtctatgtaattt

SEQ ID NO: 91786 - DNA, 40 bp, Homo sapiens
aattacatagacttaggcattaacatgtttgtggaagaat

SEQ ID NO: 91787 - DNA, 40 bp, Homo sapiens
attcttccacaaacatgttaatgcctaagtctatgtaatt

SEQ ID NO: 91788 - DNA, 40 bp, Homo sapiens
attacatagacttaggcattaacatgtttgtggaagaata

SEQ ID NO: 91789 - DNA, 40 bp, Homo sapiens
tattcttccacaaacatgttaatgcctaagtctatgtaat

SEQ ID NO: 91790 - DNA, 40 bp, Homo sapiens
ttacatagacttaggcattaacatgtttgtggaagaatat

SEQ ID NO: 91791 - DNA, 40 bp, Homo sapiens
atattcttccacaaacatgttaatgcctaagtctatgtaa

SEQ ID NO: 91792 - DNA, 40 bp, Homo sapiens
tacatagacttaggcattaacatgtttgtggaagaatata

SEQ ID NO: 91793 - DNA, 40 bp, Homo sapiens
tatattcttccacaaacatgttaatgcctaagtctatgta

SEQ ID NO: 91794 - DNA, 40 bp, Homo sapiens
acatagacttaggcattaacatgtttgtggaagaatatag

SEQ ID NO: 91795 - DNA, 40 bp, Homo sapiens
ctatattcttccacaaacatgttaatgcctaagtctatgt

SEQ ID NO: 91796 - DNA, 40 bp, Homo sapiens
catagacttaggcattaacatgtttgtggaagaatatagc

SEQ ID NO: 91797 - DNA, 40 bp, Homo sapiens
gctatattcttccacaaacatgttaatgcctaagtctatg

SEQ ID NO: 91798 - DNA, 40 bp, Homo sapiens
atagacttaggcattaacatgtttgtggaagaatatagca

SEQ ID NO: 91799 - DNA, 40 bp, Homo sapiens
tgctatattcttccacaaacatgttaatgcctaagtctat

SEQ ID NO: 91800 - DNA, 40 bp, Homo sapiens
tagacttaggcattaacatgtttgtggaagaatatagcag

SEQ ID NO: 91801 - DNA, 40 bp, Homo sapiens
ctgctatattcttccacaaacatgttaatgcctaagtcta

SEQ ID NO: 91802 - DNA, 40 bp, Homo sapiens
agacttaggcattaacatgtttgtggaagaatatagcaga

SEQ ID NO: 91803 - DNA, 40 bp, Homo sapiens
tctgctatattcttccacaaacatgttaatgcctaagtct

SEQ ID NO: 91804 - DNA, 40 bp, Homo sapiens
gacttaggcattaacatgtttgtggaagaatatagcagac

SEQ ID NO: 91805 - DNA, 40 bp, Homo sapiens
gtctgctatattcttccacaaacatgttaatgcctaagtc

SEQ ID NO: 91806 - DNA, 40 bp, Homo sapiens
acttaggcattaacatgtttgtggaagaatatagcagacg

SEQ ID NO: 91807 - DNA, 40 bp, Homo sapiens
cgtctgctatattcttccacaaacatgttaatgcctaagt

SEQ ID NO: 91808 - DNA, 40 bp, Homo sapiens
cttaggcattaacatgtttgtggaagaatatagcagacgt

SEQ ID NO: 91809 - DNA, 40 bp, Homo sapiens
acgtctgctatattcttccacaaacatgttaatgcctaag

SEQ ID NO: 91810 - DNA, 40 bp, Homo sapiens
ttaggcattaacatgtttgtggaagaatatagcagacgta

SEQ ID NO: 91811 - DNA, 40 bp, Homo sapiens
tacgtctgctatattcttccacaaacatgttaatgcctaa

SEQ ID NO: 91812 - DNA, 40 bp, Homo sapiens
taggcattaacatgtttgtggaagaatatagcagacgtat

SEQ ID NO: 91813 - DNA, 40 bp, Homo sapiens
atacgtctgctatattcttccacaaacatgttaatgccta

SEQ ID NO: 91814 - DNA, 40 bp, Homo sapiens
aggcattaacatgtttgtggaagaatatagcagacgtata

SEQ ID NO: 91815 - DNA, 40 bp, Homo sapiens
tatacgtctgctatattcttccacaaacatgttaatgcct

SEQ ID NO: 91816 - DNA, 40 bp, Homo sapiens
ggcattaacatgtttgtggaagaatatagcagacgtatat

SEQ ID NO: 91817 - DNA, 40 bp, Homo sapiens
atatacgtctgctatattcttccacaaacatgttaatgcc

SEQ ID NO: 91818 - DNA, 40 bp, Homo sapiens
gcattaacatgtttgtggaagaatatagcagacgtatatt

SEQ ID NO: 91819 - DNA, 40 bp, Homo sapiens
aatatacgtctgctatattcttccacaaacatgttaatgc

SEQ ID NO: 91820 - DNA, 40 bp, Homo sapiens
cattaacatgtttgtggaagaatatagcagacgtatattg

SEQ ID NO: 91821 - DNA, 40 bp, Homo sapiens
caatatacgtctgctatattcttccacaaacatgttaatg

SEQ ID NO: 91822 - DNA, 40 bp, Homo sapiens
attaacatgtttgtggaagaatatagcagacgtatattgt

SEQ ID NO: 91823 - DNA, 40 bp, Homo sapiens
acaatatacgtctgctatattcttccacaaacatgttaat

SEQ ID NO: 91824 - DNA, 40 bp, Homo sapiens
ttaacatgtttgtggaagaatatagcagacgtatattgta

SEQ ID NO: 91825 - DNA, 40 bp, Homo sapiens
tacaatatacgtctgctatattcttccacaaacatgttaa

SEQ ID NO: 91826 - DNA, 40 bp, Homo sapiens
taacatgtttgtggaagaatatagcagacgtatattgtat

SEQ ID NO: 91827 - DNA, 40 bp, Homo sapiens
atacaatatacgtctgctatattcttccacaaacatgtta

SEQ ID NO: 91828 - DNA, 40 bp, Homo sapiens
aacatgtttgtggaagaatatagcagacgtatattgtatc

SEQ ID NO: 91829 - DNA, 40 bp, Homo sapiens
gatacaatatacgtctgctatattcttccacaaacatgtt

SEQ ID NO: 91830 - DNA, 40 bp, Homo sapiens
acatgtttgtggaagaatatagcagacgtatattgtatca

SEQ ID NO: 91831 - DNA, 40 bp, Homo sapiens
tgatacaatatacgtctgctatattcttccacaaacatgt

SEQ ID NO: 91832 - DNA, 40 bp, Homo sapiens
catgtttgtggaagaatatagcagacgtatattgtatcat

SEQ ID NO: 91833 - DNA, 40 bp, Homo sapiens
atgatacaatatacgtctgctatattcttccacaaacatg

SEQ ID NO: 91834 - DNA, 40 bp, Homo sapiens
atgtttgtggaagaatatagcagacgtatattgtatcatt

SEQ ID NO: 91835 - DNA, 40 bp, Homo sapiens
aatgatacaatatacgtctgctatattcttccacaaacat

SEQ ID NO: 91836 - DNA, 40 bp, Homo sapiens
tgtttgtggaagaatatagcagacgtatattgtatcattt

SEQ ID NO: 91837 - DNA, 40 bp, Homo sapiens
aaatgatacaatatacgtctgctatattcttccacaaaca

SEQ ID NO: 91838 - DNA, 40 bp, Homo sapiens
gtttgtggaagaatatagcagacgtatattgtatcatttg

SEQ ID NO: 91839 - DNA, 40 bp, Homo sapiens
caaatgatacaatatacgtctgctatattcttccacaaac

SEQ ID NO: 91840 - DNA, 40 bp, Homo sapiens
tttgtggaagaatatagcagacgtatattgtatcatttga

SEQ ID NO: 91841 - DNA, 40 bp, Homo sapiens
tcaaatgatacaatatacgtctgctatattcttccacaaa

SEQ ID NO: 91842 - DNA, 40 bp, Homo sapiens
ttgtggaagaatatagcagacgtatattgtatcatttgag

SEQ ID NO: 91843 - DNA, 40 bp, Homo sapiens
ctcaaatgatacaatatacgtctgctatattcttccacaa

SEQ ID NO: 91844 - DNA, 40 bp, Homo sapiens
tgtggaagaatatagcagacgtatattgtatcatttgagt

SEQ ID NO: 91845 - DNA, 40 bp, Homo sapiens
actcaaatgatacaatatacgtctgctatattcttccaca

SEQ ID NO: 91846 - DNA, 40 bp, Homo sapiens
gtggaagaatatagcagacgtatattgtatcatttgagtg

SEQ ID NO: 91847 - DNA, 40 bp, Homo sapiens
cactcaaatgatacaatatacgtctgctatattcttccac

SEQ ID NO: 91848 - DNA, 40 bp, Homo sapiens
tggaagaatatagcagacgtatattgtatcatttgagtga

SEQ ID NO: 91849 - DNA, 40 bp, Homo sapiens
tcactcaaatgatacaatatacgtctgctatattcttcca

SEQ ID NO: 91850 - DNA, 40 bp, Homo sapiens
ggaagaatatagcagacgtatattgtatcatttgagtgaa

SEQ ID NO: 91851 - DNA, 40 bp, Homo sapiens
ttcactcaaatgatacaatatacgtctgctatattcttcc

SEQ ID NO: 91852 - DNA, 40 bp, Homo sapiens
gaagaatatagcagacgtatattgtatcatttgagtgaat

SEQ ID NO: 91853 - DNA, 40 bp, Homo sapiens
attcactcaaatgatacaatatacgtctgctatattcttc

SEQ ID NO: 91854 - DNA, 40 bp, Homo sapiens
aagaatatagcagacgtatattgtatcatttgagtgaatg

SEQ ID NO: 91855 - DNA, 40 bp, Homo sapiens
cattcactcaaatgatacaatatacgtctgctatattctt

SEQ ID NO: 91856 - DNA, 40 bp, Homo sapiens
agaatatagcagacgtatattgtatcatttgagtgaatgt

SEQ ID NO: 91857 - DNA, 40 bp, Homo sapiens
acattcactcaaatgatacaatatacgtctgctatattct

SEQ ID NO: 91858 - DNA, 40 bp, Homo sapiens
gaatatagcagacgtatattgtatcatttgagtgaatgtt

SEQ ID NO: 91859 - DNA, 40 bp, Homo sapiens
aacattcactcaaatgatacaatatacgtctgctatattc

SEQ ID NO: 91860 - DNA, 40 bp, Homo sapiens
aatatagcagacgtatattgtatcatttgagtgaatgttc

SEQ ID NO: 91861 - DNA, 40 bp, Homo sapiens
gaacattcactcaaatgatacaatatacgtctgctatatt

SEQ ID NO: 91862 - DNA, 40 bp, Homo sapiens
atatagcagacgtatattgtatcatttgagtgaatgttcc

SEQ ID NO: 91863 - DNA, 40 bp, Homo sapiens
ggaacattcactcaaatgatacaatatacgtctgctatat

SEQ ID NO: 91864 - DNA, 40 bp, Homo sapiens
tatagcagacgtatattgtatcatttgagtgaatgttccc

SEQ ID NO: 91865 - DNA, 40 bp, Homo sapiens
gggaacattcactcaaatgatacaatatacgtctgctata

SEQ ID NO: 91866 - DNA, 40 bp, Homo sapiens
atagcagacgtatattgtatcatttgagtgaatgttccca

SEQ ID NO: 91867 - DNA, 40 bp, Homo sapiens
tgggaacattcactcaaatgatacaatatacgtctgctat

SEQ ID NO: 91868 - DNA, 40 bp, Homo sapiens
tagcagacgtatattgtatcatttgagtgaatgttcccaa

SEQ ID NO: 91869 - DNA, 40 bp, Homo sapiens
ttgggaacattcactcaaatgatacaatatacgtctgcta

SEQ ID NO: 91870 - DNA, 40 bp, Homo sapiens
agcagacgtatattgtatcatttgagtgaatgttcccaag

SEQ ID NO: 91871 - DNA, 40 bp, Homo sapiens
cttgggaacattcactcaaatgatacaatatacgtctgct

SEQ ID NO: 91872 - DNA, 40 bp, Homo sapiens
gcagacgtatattgtatcatttgagtgaatgttcccaagt

SEQ ID NO: 91873 - DNA, 40 bp, Homo sapiens
acttgggaacattcactcaaatgatacaatatacgtctgc

SEQ ID NO: 91874 - DNA, 40 bp, Homo sapiens
cagacgtatattgtatcatttgagtgaatgttcccaagta

SEQ ID NO: 91875 - DNA, 40 bp, Homo sapiens
tacttgggaacattcactcaaatgatacaatatacgtctg

SEQ ID NO: 91876 - DNA, 40 bp, Homo sapiens
agacgtatattgtatcatttgagtgaatgttcccaagtag

SEQ ID NO: 91877 - DNA, 40 bp, Homo sapiens
ctacttgggaacattcactcaaatgatacaatatacgtct

SEQ ID NO: 91878 - DNA, 40 bp, Homo sapiens
gacgtatattgtatcatttgagtgaatgttcccaagtagg

SEQ ID NO: 91879 - DNA, 40 bp, Homo sapiens
cctacttgggaacattcactcaaatgatacaatatacgtc

SEQ ID NO: 91880 - DNA, 40 bp, Homo sapiens
acgtatattgtatcatttgagtgaatgttcccaagtaggc

SEQ ID NO: 91881 - DNA, 40 bp, Homo sapiens
gcctacttgggaacattcactcaaatgatacaatatacgt

SEQ ID NO: 91882 - DNA, 40 bp, Homo sapiens
cgtatattgtatcatttgagtgaatgttcccaagtaggca

SEQ ID NO: 91883 - DNA, 40 bp, Homo sapiens
tgcctacttgggaacattcactcaaatgatacaatatacg

SEQ ID NO: 91884 - DNA, 40 bp, Homo sapiens
gtatattgtatcatttgagtgaatgttcccaagtaggcat

SEQ ID NO: 91885 - DNA, 40 bp, Homo sapiens
atgcctacttgggaacattcactcaaatgatacaatatac

SEQ ID NO: 91886 - DNA, 40 bp, Homo sapiens
tatattgtatcatttgagtgaatgttcccaagtaggcatt

SEQ ID NO: 91887 - DNA, 40 bp, Homo sapiens
aatgcctacttgggaacattcactcaaatgatacaatata

SEQ ID NO: 91888 - DNA, 40 bp, Homo sapiens
atattgtatcatttgagtgaatgttcccaagtaggcattc

SEQ ID NO: 91889 - DNA, 40 bp, Homo sapiens
gaatgcctacttgggaacattcactcaaatgatacaatat

SEQ ID NO: 91890 - DNA, 40 bp, Homo sapiens
tattgtatcatttgagtgaatgttcccaagtaggcattct

SEQ ID NO: 91891 - DNA, 40 bp, Homo sapiens
agaatgcctacttgggaacattcactcaaatgatacaata

SEQ ID NO: 91892 - DNA, 40 bp, Homo sapiens
attgtatcatttgagtgaatgttcccaagtaggcattcta

SEQ ID NO: 91893 - DNA, 40 bp, Homo sapiens
tagaatgcctacttgggaacattcactcaaatgatacaat

SEQ ID NO: 91894 - DNA, 40 bp, Homo sapiens
ttgtatcatttgagtgaatgttcccaagtaggcattctag

SEQ ID NO: 91895 - DNA, 40 bp, Homo sapiens
ctagaatgcctacttgggaacattcactcaaatgatacaa

SEQ ID NO: 91896 - DNA, 40 bp, Homo sapiens
tgtatcatttgagtgaatgttcccaagtaggcattctagg

SEQ ID NO: 91897 - DNA, 40 bp, Homo sapiens
cctagaatgcctacttgggaacattcactcaaatgataca

SEQ ID NO: 91898 - DNA, 40 bp, Homo sapiens
gtatcatttgagtgaatgttcccaagtaggcattctaggc

SEQ ID NO: 91899 - DNA, 40 bp, Homo sapiens
gcctagaatgcctacttgggaacattcactcaaatgatac

SEQ ID NO: 91900 - DNA, 40 bp, Homo sapiens
tatcatttgagtgaatgttcccaagtaggcattctaggct

SEQ ID NO: 91901 - DNA, 40 bp, Homo sapiens
agcctagaatgcctacttgggaacattcactcaaatgata

SEQ ID NO: 91902 - DNA, 40 bp, Homo sapiens
atcatttgagtgaatgttcccaagtaggcattctaggctc

SEQ ID NO: 91903 - DNA, 40 bp, Homo sapiens
gagcctagaatgcctacttgggaacattcactcaaatgat

SEQ ID NO: 91904 - DNA, 40 bp, Homo sapiens
tcatttgagtgaatgttcccaagtaggcattctaggctct

SEQ ID NO: 91905 - DNA, 40 bp, Homo sapiens
agagcctagaatgcctacttgggaacattcactcaaatga

SEQ ID NO: 91906 - DNA, 40 bp, Homo sapiens
catttgagtgaatgttcccaagtaggcattctaggctcta

SEQ ID NO: 91907 - DNA, 40 bp, Homo sapiens
tagagcctagaatgcctacttgggaacattcactcaaatg

SEQ ID NO: 91908 - DNA, 40 bp, Homo sapiens
atttgagtgaatgttcccaagtaggcattctaggctctat

SEQ ID NO: 91909 - DNA, 40 bp, Homo sapiens
atagagcctagaatgcctacttgggaacattcactcaaat

SEQ ID NO: 91910 - DNA, 40 bp, Homo sapiens
tttgagtgaatgttcccaagtaggcattctaggctctatt

SEQ ID NO: 91911 - DNA, 40 bp, Homo sapiens
aatagagcctagaatgcctacttgggaacattcactcaaa

SEQ ID NO: 91912 - DNA, 40 bp, Homo sapiens
ttgagtgaatgttcccaagtaggcattctaggctctattt

SEQ ID NO: 91913 - DNA, 40 bp, Homo sapiens
aaatagagcctagaatgcctacttgggaacattcactcaa

SEQ ID NO: 91914 - DNA, 40 bp, Homo sapiens
tgagtgaatgttcccaagtaggcattctaggctctattta

SEQ ID NO: 91915 - DNA, 40 bp, Homo sapiens
taaatagagcctagaatgcctacttgggaacattcactca

SEQ ID NO: 91916 - DNA, 40 bp, Homo sapiens
gagtgaatgttcccaagtaggcattctaggctctatttaa

SEQ ID NO: 91917 - DNA, 40 bp, Homo sapiens
ttaaatagagcctagaatgcctacttgggaacattcactc

SEQ ID NO: 91918 - DNA, 40 bp, Homo sapiens
agtgaatgttcccaagtaggcattctaggctctatttaac

SEQ ID NO: 91919 - DNA, 40 bp, Homo sapiens
gttaaatagagcctagaatgcctacttgggaacattcact

SEQ ID NO: 91920 - DNA, 40 bp, Homo sapiens
gtgaatgttcccaagtaggcattctaggctctatttaact

SEQ ID NO: 91921 - DNA, 40 bp, Homo sapiens
agttaaatagagcctagaatgcctacttgggaacattcac

SEQ ID NO: 91922 - DNA, 40 bp, Homo sapiens
tgaatgttcccaagtaggcattctaggctctatttaactg

SEQ ID NO: 91923 - DNA, 40 bp, Homo sapiens
cagttaaatagagcctagaatgcctacttgggaacattca

SEQ ID NO: 91924 - DNA, 40 bp, Homo sapiens
gaatgttcccaagtaggcattctaggctctatttaactga

SEQ ID NO: 91925 - DNA, 40 bp, Homo sapiens
tcagttaaatagagcctagaatgcctacttgggaacattc

SEQ ID NO: 91926 - DNA, 40 bp, Homo sapiens
aatgttcccaagtaggcattctaggctctatttaactgag

SEQ ID NO: 91927 - DNA, 40 bp, Homo sapiens
ctcagttaaatagagcctagaatgcctacttgggaacatt

SEQ ID NO: 91928 - DNA, 40 bp, Homo sapiens
atgttcccaagtaggcattctaggctctatttaactgagt

SEQ ID NO: 91929 - DNA, 40 bp, Homo sapiens
actcagttaaatagagcctagaatgcctacttgggaacat

SEQ ID NO: 91930 - DNA, 40 bp, Homo sapiens
tgttcccaagtaggcattctaggctctatttaactgagtc

SEQ ID NO: 91931 - DNA, 40 bp, Homo sapiens
gactcagttaaatagagcctagaatgcctacttgggaaca

SEQ ID NO: 91932 - DNA, 40 bp, Homo sapiens
gttcccaagtaggcattctaggctctatttaactgagtca

SEQ ID NO: 91933 - DNA, 40 bp, Homo sapiens
tgactcagttaaatagagcctagaatgcctacttgggaac

SEQ ID NO: 91934 - DNA, 40 bp, Homo sapiens
ttcccaagtaggcattctaggctctatttaactgagtcac

SEQ ID NO: 91935 - DNA, 40 bp, Homo sapiens
gtgactcagttaaatagagcctagaatgcctacttgggaa

SEQ ID NO: 91936 - DNA, 40 bp, Homo sapiens
tcccaagtaggcattctaggctctatttaactgagtcaca

SEQ ID NO: 91937 - DNA, 40 bp, Homo sapiens
tgtgactcagttaaatagagcctagaatgcctacttggga

SEQ ID NO: 91938 - DNA, 40 bp, Homo sapiens
cccaagtaggcattctaggctctatttaactgagtcacac

SEQ ID NO: 91939 - DNA, 40 bp, Homo sapiens
gtgtgactcagttaaatagagcctagaatgcctacttggg

SEQ ID NO: 91940 - DNA, 40 bp, Homo sapiens
ccaagtaggcattctaggctctatttaactgagtcacact

SEQ ID NO: 91941 - DNA, 40 bp, Homo sapiens
agtgtgactcagttaaatagagcctagaatgcctacttgg

SEQ ID NO: 91942 - DNA, 40 bp, Homo sapiens
caagtaggcattctaggctctatttaactgagtcacactg

SEQ ID NO: 91943 - DNA, 40 bp, Homo sapiens
cagtgtgactcagttaaatagagcctagaatgcctacttg

SEQ ID NO: 91944 - DNA, 40 bp, Homo sapiens
aagtaggcattctaggctctatttaactgagtcacactgc

SEQ ID NO: 91945 - DNA, 40 bp, Homo sapiens
gcagtgtgactcagttaaatagagcctagaatgcctactt

SEQ ID NO: 91946 - DNA, 40 bp, Homo sapiens
agtaggcattctaggctctatttaactgagtcacactgca

SEQ ID NO: 91947 - DNA, 40 bp, Homo sapiens
tgcagtgtgactcagttaaatagagcctagaatgcctact

SEQ ID NO: 91948 - DNA, 40 bp, Homo sapiens
gtaggcattctaggctctatttaactgagtcacactgcat

SEQ ID NO: 91949 - DNA, 40 bp, Homo sapiens
atgcagtgtgactcagttaaatagagcctagaatgcctac

SEQ ID NO: 91950 - DNA, 40 bp, Homo sapiens
taggcattctaggctctatttaactgagtcacactgcata

SEQ ID NO: 91951 - DNA, 40 bp, Homo sapiens
tatgcagtgtgactcagttaaatagagcctagaatgccta

SEQ ID NO: 91952 - DNA, 40 bp, Homo sapiens
aggcattctaggctctatttaactgagtcacactgcatag

SEQ ID NO: 91953 - DNA, 40 bp, Homo sapiens
ctatgcagtgtgactcagttaaatagagcctagaatgcct

SEQ ID NO: 91954 - DNA, 40 bp, Homo sapiens
ggcattctaggctctatttaactgagtcacactgcatagg

SEQ ID NO: 91955 - DNA, 40 bp, Homo sapiens
cctatgcagtgtgactcagttaaatagagcctagaatgcc

SEQ ID NO: 91956 - DNA, 40 bp, Homo sapiens
gcattctaggctctatttaactgagtcacactgcatagga

SEQ ID NO: 91957 - DNA, 40 bp, Homo sapiens
tcctatgcagtgtgactcagttaaatagagcctagaatgc

SEQ ID NO: 91958 - DNA, 40 bp, Homo sapiens
cattctaggctctatttaactgagtcacactgcataggaa

SEQ ID NO: 91959 - DNA, 40 bp, Homo sapiens
ttcctatgcagtgtgactcagttaaatagagcctagaatg

SEQ ID NO: 91960 - DNA, 40 bp, Homo sapiens
attctaggctctatttaactgagtcacactgcataggaat

SEQ ID NO: 91961 - DNA, 40 bp, Homo sapiens
attcctatgcagtgtgactcagttaaatagagcctagaat

SEQ ID NO: 91962 - DNA, 40 bp, Homo sapiens
ttctaggctctatttaactgagtcacactgcataggaatt

SEQ ID NO: 91963 - DNA, 40 bp, Homo sapiens
aattcctatgcagtgtgactcagttaaatagagcctagaa

SEQ ID NO: 91964 - DNA, 40 bp, Homo sapiens
tctaggctctatttaactgagtcacactgcataggaattt

SEQ ID NO: 91965 - DNA, 40 bp, Homo sapiens
aaattcctatgcagtgtgactcagttaaatagagcctaga

SEQ ID NO: 91966 - DNA, 40 bp, Homo sapiens
ctaggctctatttaactgagtcacactgcataggaattta

SEQ ID NO: 91967 - DNA, 40 bp, Homo sapiens
taaattcctatgcagtgtgactcagttaaatagagcctag

SEQ ID NO: 91968 - DNA, 40 bp, Homo sapiens
taggctctatttaactgagtcacactgcataggaatttag

SEQ ID NO: 91969 - DNA, 40 bp, Homo sapiens
ctaaattcctatgcagtgtgactcagttaaatagagccta

SEQ ID NO: 91970 - DNA, 40 bp, Homo sapiens
aggctctatttaactgagtcacactgcataggaatttaga

SEQ ID NO: 91971 - DNA, 40 bp, Homo sapiens
tctaaattcctatgcagtgtgactcagttaaatagagcct

SEQ ID NO: 91972 - DNA, 40 bp, Homo sapiens
ggctctatttaactgagtcacactgcataggaatttagaa

SEQ ID NO: 91973 - DNA, 40 bp, Homo sapiens
ttctaaattcctatgcagtgtgactcagttaaatagagcc

SEQ ID NO: 91974 - DNA, 40 bp, Homo sapiens
gctctatttaactgagtcacactgcataggaatttagaac

SEQ ID NO: 91975 - DNA, 40 bp, Homo sapiens
gttctaaattcctatgcagtgtgactcagttaaatagagc

SEQ ID NO: 91976 - DNA, 40 bp, Homo sapiens
ctctatttaactgagtcacactgcataggaatttagaacc

SEQ ID NO: 91977 - DNA, 40 bp, Homo sapiens
ggttctaaattcctatgcagtgtgactcagttaaatagag

SEQ ID NO: 91978 - DNA, 40 bp, Homo sapiens
tctatttaactgagtcacactgcataggaatttagaacct

SEQ ID NO: 91979 - DNA, 40 bp, Homo sapiens
aggttctaaattcctatgcagtgtgactcagttaaataga

SEQ ID NO: 91980 - DNA, 40 bp, Homo sapiens
ctatttaactgagtcacactgcataggaatttagaaccta

SEQ ID NO: 91981 - DNA, 40 bp, Homo sapiens
taggttctaaattcctatgcagtgtgactcagttaaatag

SEQ ID NO: 91982 - DNA, 40 bp, Homo sapiens
tatttaactgagtcacactgcataggaatttagaacctaa

SEQ ID NO: 91983 - DNA, 40 bp, Homo sapiens
ttaggttctaaattcctatgcagtgtgactcagttaaata

SEQ ID NO: 91984 - DNA, 40 bp, Homo sapiens
atttaactgagtcacactgcataggaatttagaacctaac

SEQ ID NO: 91985 - DNA, 40 bp, Homo sapiens
gttaggttctaaattcctatgcagtgtgactcagttaaat

SEQ ID NO: 91986 - DNA, 40 bp, Homo sapiens
tttaactgagtcacactgcataggaatttagaacctaact

SEQ ID NO: 91987 - DNA, 40 bp, Homo sapiens
agttaggttctaaattcctatgcagtgtgactcagttaaa

SEQ ID NO: 91988 - DNA, 40 bp, Homo sapiens
ttaactgagtcacactgcataggaatttagaacctaactt

SEQ ID NO: 91989 - DNA, 40 bp, Homo sapiens
aagttaggttctaaattcctatgcagtgtgactcagttaa

SEQ ID NO: 91990 - DNA, 40 bp, Homo sapiens
taactgagtcacactgcataggaatttagaacctaacttt

SEQ ID NO: 91991 - DNA, 40 bp, Homo sapiens
aaagttaggttctaaattcctatgcagtgtgactcagtta

SEQ ID NO: 91992 - DNA, 40 bp, Homo sapiens
aactgagtcacactgcataggaatttagaacctaactttt

SEQ ID NO: 91993 - DNA, 40 bp, Homo sapiens
aaaagttaggttctaaattcctatgcagtgtgactcagtt

SEQ ID NO: 91994 - DNA, 40 bp, Homo sapiens
actgagtcacactgcataggaatttagaacctaactttta

SEQ ID NO: 91995 - DNA, 40 bp, Homo sapiens
taaaagttaggttctaaattcctatgcagtgtgactcagt

SEQ ID NO: 91996 - DNA, 40 bp, Homo sapiens
ctgagtcacactgcataggaatttagaacctaacttttat

SEQ ID NO: 91997 - DNA, 40 bp, Homo sapiens
ataaaagttaggttctaaattcctatgcagtgtgactcag

SEQ ID NO: 91998 - DNA, 40 bp, Homo sapiens
tgagtcacactgcataggaatttagaacctaacttttata

SEQ ID NO: 91999 - DNA, 40 bp, Homo sapiens
tataaaagttaggttctaaattcctatgcagtgtgactca

SEQ ID NO: 92000 - DNA, 40 bp, Homo sapiens
gagtcacactgcataggaatttagaacctaacttttatag

SEQ ID NO: 92001 - DNA, 40 bp, Homo sapiens
ctataaaagttaggttctaaattcctatgcagtgtgactc

SEQ ID NO: 92002 - DNA, 40 bp, Homo sapiens
agtcacactgcataggaatttagaacctaacttttatagg

SEQ ID NO: 92003 - DNA, 40 bp, Homo sapiens
cctataaaagttaggttctaaattcctatgcagtgtgact

SEQ ID NO: 92004 - DNA, 40 bp, Homo sapiens
gtcacactgcataggaatttagaacctaacttttataggt

SEQ ID NO: 92005 - DNA, 40 bp, Homo sapiens
acctataaaagttaggttctaaattcctatgcagtgtgac

SEQ ID NO: 92006 - DNA, 40 bp, Homo sapiens
tcacactgcataggaatttagaacctaacttttataggtt

SEQ ID NO: 92007 - DNA, 40 bp, Homo sapiens
aacctataaaagttaggttctaaattcctatgcagtgtga

SEQ ID NO: 92008 - DNA, 40 bp, Homo sapiens
cacactgcataggaatttagaacctaacttttataggtta

SEQ ID NO: 92009 - DNA, 40 bp, Homo sapiens
taacctataaaagttaggttctaaattcctatgcagtgtg

SEQ ID NO: 92010 - DNA, 40 bp, Homo sapiens
acactgcataggaatttagaacctaacttttataggttat

SEQ ID NO: 92011 - DNA, 40 bp, Homo sapiens
ataacctataaaagttaggttctaaattcctatgcagtgt

SEQ ID NO: 92012 - DNA, 40 bp, Homo sapiens
cactgcataggaatttagaacctaacttttataggttatc

SEQ ID NO: 92013 - DNA, 40 bp, Homo sapiens
gataacctataaaagttaggttctaaattcctatgcagtg

SEQ ID NO: 92014 - DNA, 40 bp, Homo sapiens
actgcataggaatttagaacctaacttttataggttatca

SEQ ID NO: 92015 - DNA, 40 bp, Homo sapiens
tgataacctataaaagttaggttctaaattcctatgcagt

SEQ ID NO: 92016 - DNA, 40 bp, Homo sapiens
ctgcataggaatttagaacctaacttttataggttatcaa

SEQ ID NO: 92017 - DNA, 40 bp, Homo sapiens
ttgataacctataaaagttaggttctaaattcctatgcag

SEQ ID NO: 92018 - DNA, 40 bp, Homo sapiens
tgcataggaatttagaacctaacttttataggttatcaaa

SEQ ID NO: 92019 - DNA, 40 bp, Homo sapiens
tttgataacctataaaagttaggttctaaattcctatgca

SEQ ID NO: 92020 - DNA, 40 bp, Homo sapiens
gcataggaatttagaacctaacttttataggttatcaaaa

SEQ ID NO: 92021 - DNA, 40 bp, Homo sapiens
ttttgataacctataaaagttaggttctaaattcctatgc

SEQ ID NO: 92022 - DNA, 40 bp, Homo sapiens
cataggaatttagaacctaacttttataggttatcaaaac

SEQ ID NO: 92023 - DNA, 40 bp, Homo sapiens
gttttgataacctataaaagttaggttctaaattcctatg

SEQ ID NO: 92024 - DNA, 40 bp, Homo sapiens
ataggaatttagaacctaacttttataggttatcaaaact

SEQ ID NO: 92025 - DNA, 40 bp, Homo sapiens
agttttgataacctataaaagttaggttctaaattcctat

SEQ ID NO: 92026 - DNA, 40 bp, Homo sapiens
taggaatttagaacctaacttttataggttatcaaaactg

SEQ ID NO: 92027 - DNA, 40 bp, Homo sapiens
cagttttgataacctataaaagttaggttctaaattccta

SEQ ID NO: 92028 - DNA, 40 bp, Homo sapiens
aggaatttagaacctaacttttataggttatcaaaactgt

SEQ ID NO: 92029 - DNA, 40 bp, Homo sapiens
acagttttgataacctataaaagttaggttctaaattcct

SEQ ID NO: 92030 - DNA, 40 bp, Homo sapiens
ggaatttagaacctaacttttataggttatcaaaactgtt

SEQ ID NO: 92031 - DNA, 40 bp, Homo sapiens
aacagttttgataacctataaaagttaggttctaaattcc

SEQ ID NO: 92032 - DNA, 40 bp, Homo sapiens
gaatttagaacctaacttttataggttatcaaaactgttg

SEQ ID NO: 92033 - DNA, 40 bp, Homo sapiens
caacagttttgataacctataaaagttaggttctaaattc

SEQ ID NO: 92034 - DNA, 40 bp, Homo sapiens
aatttagaacctaacttttataggttatcaaaactgttgt

SEQ ID NO: 92035 - DNA, 40 bp, Homo sapiens
acaacagttttgataacctataaaagttaggttctaaatt

SEQ ID NO: 92036 - DNA, 40 bp, Homo sapiens
atttagaacctaacttttataggttatcaaaactgttgtc

SEQ ID NO: 92037 - DNA, 40 bp, Homo sapiens
gacaacagttttgataacctataaaagttaggttctaaat

SEQ ID NO: 92038 - DNA, 40 bp, Homo sapiens
tttagaacctaacttttataggttatcaaaactgttgtca

SEQ ID NO: 92039 - DNA, 40 bp, Homo sapiens
tgacaacagttttgataacctataaaagttaggttctaaa

SEQ ID NO: 92040 - DNA, 40 bp, Homo sapiens
ttagaacctaacttttataggttatcaaaactgttgtcac

SEQ ID NO: 92041 - DNA, 40 bp, Homo sapiens
gtgacaacagttttgataacctataaaagttaggttctaa

SEQ ID NO: 92042 - DNA, 40 bp, Homo sapiens
tagaacctaacttttataggttatcaaaactgttgtcacc

SEQ ID NO: 92043 - DNA, 40 bp, Homo sapiens
ggtgacaacagttttgataacctataaaagttaggttcta

SEQ ID NO: 92044 - DNA, 40 bp, Homo sapiens
agaacctaacttttataggttatcaaaactgttgtcacca

SEQ ID NO: 92045 - DNA, 40 bp, Homo sapiens
tggtgacaacagttttgataacctataaaagttaggttct

SEQ ID NO: 92046 - DNA, 40 bp, Homo sapiens
gaacctaacttttataggttatcaaaactgttgtcaccat

SEQ ID NO: 92047 - DNA, 40 bp, Homo sapiens
atggtgacaacagttttgataacctataaaagttaggttc

SEQ ID NO: 92048 - DNA, 40 bp, Homo sapiens
aacctaacttttataggttatcaaaactgttgtcaccatt

SEQ ID NO: 92049 - DNA, 40 bp, Homo sapiens
aatggtgacaacagttttgataacctataaaagttaggtt

SEQ ID NO: 92050 - DNA, 40 bp, Homo sapiens
acctaacttttataggttatcaaaactgttgtcaccattg

SEQ ID NO: 92051 - DNA, 40 bp, Homo sapiens
caatggtgacaacagttttgataacctataaaagttaggt

SEQ ID NO: 92052 - DNA, 40 bp, Homo sapiens
cctaacttttataggttatcaaaactgttgtcaccattgc

SEQ ID NO: 92053 - DNA, 40 bp, Homo sapiens
gcaatggtgacaacagttttgataacctataaaagttagg

SEQ ID NO: 92054 - DNA, 40 bp, Homo sapiens
ctaacttttataggttatcaaaactgttgtcaccattgca

SEQ ID NO: 92055 - DNA, 40 bp, Homo sapiens
tgcaatggtgacaacagttttgataacctataaaagttag

SEQ ID NO: 92056 - DNA, 40 bp, Homo sapiens
taacttttataggttatcaaaactgttgtcaccattgcac

SEQ ID NO: 92057 - DNA, 40 bp, Homo sapiens
gtgcaatggtgacaacagttttgataacctataaaagtta

SEQ ID NO: 92058 - DNA, 40 bp, Homo sapiens
aacttttataggttatcaaaactgttgtcaccattgcaca

SEQ ID NO: 92059 - DNA, 40 bp, Homo sapiens
tgtgcaatggtgacaacagttttgataacctataaaagtt

SEQ ID NO: 92060 - DNA, 40 bp, Homo sapiens
acttttataggttatcaaaactgttgtcaccattgcacaa

SEQ ID NO: 92061 - DNA, 40 bp, Homo sapiens
ttgtgcaatggtgacaacagttttgataacctataaaagt

SEQ ID NO: 92062 - DNA, 40 bp, Homo sapiens
cttttataggttatcaaaactgttgtcaccattgcacaat

SEQ ID NO: 92063 - DNA, 40 bp, Homo sapiens
attgtgcaatggtgacaacagttttgataacctataaaag

SEQ ID NO: 92064 - DNA, 40 bp, Homo sapiens
ttttataggttatcaaaactgttgtcaccattgcacaatt

SEQ ID NO: 92065 - DNA, 40 bp, Homo sapiens
aattgtgcaatggtgacaacagttttgataacctataaaa

SEQ ID NO: 92066 - DNA, 40 bp, Homo sapiens
tttataggttatcaaaactgttgtcaccattgcacaattt

SEQ ID NO: 92067 - DNA, 40 bp, Homo sapiens
aaattgtgcaatggtgacaacagttttgataacctataaa

SEQ ID NO: 92068 - DNA, 40 bp, Homo sapiens
ttataggttatcaaaactgttgtcaccattgcacaatttt

SEQ ID NO: 92069 - DNA, 40 bp, Homo sapiens
aaaattgtgcaatggtgacaacagttttgataacctataa

SEQ ID NO: 92070 - DNA, 40 bp, Homo sapiens
tataggttatcaaaactgttgtcaccattgcacaattttg

SEQ ID NO: 92071 - DNA, 40 bp, Homo sapiens
caaaattgtgcaatggtgacaacagttttgataacctata

SEQ ID NO: 92072 - DNA, 40 bp, Homo sapiens
ataggttatcaaaactgttgtcaccattgcacaattttgt

SEQ ID NO: 92073 - DNA, 40 bp, Homo sapiens
acaaaattgtgcaatggtgacaacagttttgataacctat

SEQ ID NO: 92074 - DNA, 40 bp, Homo sapiens
taggttatcaaaactgttgtcaccattgcacaattttgtc

SEQ ID NO: 92075 - DNA, 40 bp, Homo sapiens
gacaaaattgtgcaatggtgacaacagttttgataaccta

SEQ ID NO: 92076 - DNA, 40 bp, Homo sapiens
aggttatcaaaactgttgtcaccattgcacaattttgtcc

SEQ ID NO: 92077 - DNA, 40 bp, Homo sapiens
ggacaaaattgtgcaatggtgacaacagttttgataacct

SEQ ID NO: 92078 - DNA, 40 bp, Homo sapiens
ggttatcaaaactgttgtcaccattgcacaattttgtcct

SEQ ID NO: 92079 - DNA, 40 bp, Homo sapiens
aggacaaaattgtgcaatggtgacaacagttttgataacc

SEQ ID NO: 92080 - DNA, 40 bp, Homo sapiens
gttatcaaaactgttgtcaccattgcacaattttgtccta

SEQ ID NO: 92081 - DNA, 40 bp, Homo sapiens
taggacaaaattgtgcaatggtgacaacagttttgataac

SEQ ID NO: 92082 - DNA, 40 bp, Homo sapiens
ttatcaaaactgttgtcaccattgcacaattttgtcctaa

SEQ ID NO: 92083 - DNA, 40 bp, Homo sapiens
ttaggacaaaattgtgcaatggtgacaacagttttgataa

SEQ ID NO: 92084 - DNA, 40 bp, Homo sapiens
tatcaaaactgttgtcaccattgcacaattttgtcctaat

SEQ ID NO: 92085 - DNA, 40 bp, Homo sapiens
attaggacaaaattgtgcaatggtgacaacagttttgata

SEQ ID NO: 92086 - DNA, 40 bp, Homo sapiens
atcaaaactgttgtcaccattgcacaattttgtcctaata

SEQ ID NO: 92087 - DNA, 40 bp, Homo sapiens
tattaggacaaaattgtgcaatggtgacaacagttttgat

SEQ ID NO: 92088 - DNA, 40 bp, Homo sapiens
tcaaaactgttgtcaccattgcacaattttgtcctaatat

SEQ ID NO: 92089 - DNA, 40 bp, Homo sapiens
atattaggacaaaattgtgcaatggtgacaacagttttga

SEQ ID NO: 92090 - DNA, 40 bp, Homo sapiens
caaaactgttgtcaccattgcacaattttgtcctaatata

SEQ ID NO: 92091 - DNA, 40 bp, Homo sapiens
tatattaggacaaaattgtgcaatggtgacaacagttttg

SEQ ID NO: 92092 - DNA, 40 bp, Homo sapiens
aaaactgttgtcaccattgcacaattttgtcctaatatat

SEQ ID NO: 92093 - DNA, 40 bp, Homo sapiens
atatattaggacaaaattgtgcaatggtgacaacagtttt

SEQ ID NO: 92094 - DNA, 40 bp, Homo sapiens
aaactgttgtcaccattgcacaattttgtcctaatatata

SEQ ID NO: 92095 - DNA, 40 bp, Homo sapiens
tatatattaggacaaaattgtgcaatggtgacaacagttt

SEQ ID NO: 92096 - DNA, 40 bp, Homo sapiens
aactgttgtcaccattgcacaattttgtcctaatatatac

SEQ ID NO: 92097 - DNA, 40 bp, Homo sapiens
gtatatattaggacaaaattgtgcaatggtgacaacagtt

SEQ ID NO: 92098 - DNA, 40 bp, Homo sapiens
actgttgtcaccattgcacaattttgtcctaatatataca

SEQ ID NO: 92099 - DNA, 40 bp, Homo sapiens
tgtatatattaggacaaaattgtgcaatggtgacaacagt

SEQ ID NO: 92100 - DNA, 40 bp, Homo sapiens
ctgttgtcaccattgcacaattttgtcctaatatatacat

SEQ ID NO: 92101 - DNA, 40 bp, Homo sapiens
atgtatatattaggacaaaattgtgcaatggtgacaacag

SEQ ID NO: 92102 - DNA, 40 bp, Homo sapiens
tgttgtcaccattgcacaattttgtcctaatatatacata

SEQ ID NO: 92103 - DNA, 40 bp, Homo sapiens
tatgtatatattaggacaaaattgtgcaatggtgacaaca

SEQ ID NO: 92104 - DNA, 40 bp, Homo sapiens
gttgtcaccattgcacaattttgtcctaatatatacatag

SEQ ID NO: 92105 - DNA, 40 bp, Homo sapiens
ctatgtatatattaggacaaaattgtgcaatggtgacaac

SEQ ID NO: 92106 - DNA, 40 bp, Homo sapiens
ttgtcaccattgcacaattttgtcctaatatatacataga

SEQ ID NO: 92107 - DNA, 40 bp, Homo sapiens
tctatgtatatattaggacaaaattgtgcaatggtgacaa

SEQ ID NO: 92108 - DNA, 40 bp, Homo sapiens
tgtcaccattgcacaattttgtcctaatatatacatagaa

SEQ ID NO: 92109 - DNA, 40 bp, Homo sapiens
ttctatgtatatattaggacaaaattgtgcaatggtgaca

SEQ ID NO: 92110 - DNA, 40 bp, Homo sapiens
gtcaccattgcacaattttgtcctaatatatacatagaaa

SEQ ID NO: 92111 - DNA, 40 bp, Homo sapiens
tttctatgtatatattaggacaaaattgtgcaatggtgac

SEQ ID NO: 92112 - DNA, 40 bp, Homo sapiens
tcaccattgcacaattttgtcctaatatatacatagaaac

SEQ ID NO: 92113 - DNA, 40 bp, Homo sapiens
gtttctatgtatatattaggacaaaattgtgcaatggtga

SEQ ID NO: 92114 - DNA, 40 bp, Homo sapiens
caccattgcacaattttgtcctaatatatacatagaaact

SEQ ID NO: 92115 - DNA, 40 bp, Homo sapiens
agtttctatgtatatattaggacaaaattgtgcaatggtg

SEQ ID NO: 92116 - DNA, 40 bp, Homo sapiens
accattgcacaattttgtcctaatatatacatagaaactt

SEQ ID NO: 92117 - DNA, 40 bp, Homo sapiens
aagtttctatgtatatattaggacaaaattgtgcaatggt

SEQ ID NO: 92118 - DNA, 40 bp, Homo sapiens
ccattgcacaattttgtcctaatatatacatagaaacttt

SEQ ID NO: 92119 - DNA, 40 bp, Homo sapiens
aaagtttctatgtatatattaggacaaaattgtgcaatgg

SEQ ID NO: 92120 - DNA, 40 bp, Homo sapiens
cattgcacaattttgtcctaatatatacatagaaactttg

SEQ ID NO: 92121 - DNA, 40 bp, Homo sapiens
caaagtttctatgtatatattaggacaaaattgtgcaatg

SEQ ID NO: 92122 - DNA, 40 bp, Homo sapiens
attgcacaattttgtcctaatatatacatagaaactttgt

SEQ ID NO: 92123 - DNA, 40 bp, Homo sapiens
acaaagtttctatgtatatattaggacaaaattgtgcaat

SEQ ID NO: 92124 - DNA, 40 bp, Homo sapiens
ttgcacaattttgtcctaatatatacatagaaactttgtg

SEQ ID NO: 92125 - DNA, 40 bp, Homo sapiens
cacaaagtttctatgtatatattaggacaaaattgtgcaa

SEQ ID NO: 92126 - DNA, 40 bp, Homo sapiens
tgcacaattttgtcctaatatatacatagaaactttgtgg

SEQ ID NO: 92127 - DNA, 40 bp, Homo sapiens
ccacaaagtttctatgtatatattaggacaaaattgtgca

SEQ ID NO: 92128 - DNA, 40 bp, Homo sapiens
gcacaattttgtcctaatatatacatagaaactttgtggg

SEQ ID NO: 92129 - DNA, 40 bp, Homo sapiens
cccacaaagtttctatgtatatattaggacaaaattgtgc

SEQ ID NO: 92130 - DNA, 40 bp, Homo sapiens
cacaattttgtcctaatatatacatagaaactttgtgggg

SEQ ID NO: 92131 - DNA, 40 bp, Homo sapiens
ccccacaaagtttctatgtatatattaggacaaaattgtg

SEQ ID NO: 92132 - DNA, 40 bp, Homo sapiens
acaattttgtcctaatatatacatagaaactttgtggggc

SEQ ID NO: 92133 - DNA, 40 bp, Homo sapiens
gccccacaaagtttctatgtatatattaggacaaaattgt

SEQ ID NO: 92134 - DNA, 40 bp, Homo sapiens
caattttgtcctaatatatacatagaaactttgtggggca

SEQ ID NO: 92135 - DNA, 40 bp, Homo sapiens
tgccccacaaagtttctatgtatatattaggacaaaattg

SEQ ID NO: 92136 - DNA, 40 bp, Homo sapiens
aattttgtcctaatatatacatagaaactttgtggggcat

SEQ ID NO: 92137 - DNA, 40 bp, Homo sapiens
atgccccacaaagtttctatgtatatattaggacaaaatt

SEQ ID NO: 92138 - DNA, 40 bp, Homo sapiens
attttgtcctaatatatacatagaaactttgtggggcatg

SEQ ID NO: 92139 - DNA, 40 bp, Homo sapiens
catgccccacaaagtttctatgtatatattaggacaaaat

SEQ ID NO: 92140 - DNA, 40 bp, Homo sapiens
ttttgtcctaatatatacatagaaactttgtggggcatgt

SEQ ID NO: 92141 - DNA, 40 bp, Homo sapiens
acatgccccacaaagtttctatgtatatattaggacaaaa

SEQ ID NO: 92142 - DNA, 40 bp, Homo sapiens
tttgtcctaatatatacatagaaactttgtggggcatgtt

SEQ ID NO: 92143 - DNA, 40 bp, Homo sapiens
aacatgccccacaaagtttctatgtatatattaggacaaa

SEQ ID NO: 92144 - DNA, 40 bp, Homo sapiens
ttgtcctaatatatacatagaaactttgtggggcatgtta

SEQ ID NO: 92145 - DNA, 40 bp, Homo sapiens
taacatgccccacaaagtttctatgtatatattaggacaa

SEQ ID NO: 92146 - DNA, 40 bp, Homo sapiens
tgtcctaatatatacatagaaactttgtggggcatgttaa

SEQ ID NO: 92147 - DNA, 40 bp, Homo sapiens
ttaacatgccccacaaagtttctatgtatatattaggaca

SEQ ID NO: 92148 - DNA, 40 bp, Homo sapiens
gtcctaatatatacatagaaactttgtggggcatgttaag

SEQ ID NO: 92149 - DNA, 40 bp, Homo sapiens
cttaacatgccccacaaagtttctatgtatatattaggac

SEQ ID NO: 92150 - DNA, 40 bp, Homo sapiens
tcctaatatatacatagaaactttgtggggcatgttaagt

SEQ ID NO: 92151 - DNA, 40 bp, Homo sapiens
acttaacatgccccacaaagtttctatgtatatattagga

SEQ ID NO: 92152 - DNA, 40 bp, Homo sapiens
cctaatatatacatagaaactttgtggggcatgttaagtt

SEQ ID NO: 92153 - DNA, 40 bp, Homo sapiens
aacttaacatgccccacaaagtttctatgtatatattagg

SEQ ID NO: 92154 - DNA, 40 bp, Homo sapiens
ctaatatatacatagaaactttgtggggcatgttaagtta

SEQ ID NO: 92155 - DNA, 40 bp, Homo sapiens
taacttaacatgccccacaaagtttctatgtatatattag

SEQ ID NO: 92156 - DNA, 40 bp, Homo sapiens
taatatatacatagaaactttgtggggcatgttaagttac

SEQ ID NO: 92157 - DNA, 40 bp, Homo sapiens
gtaacttaacatgccccacaaagtttctatgtatatatta

SEQ ID NO: 92158 - DNA, 40 bp, Homo sapiens
aatatatacatagaaactttgtggggcatgttaagttaca

SEQ ID NO: 92159 - DNA, 40 bp, Homo sapiens
tgtaacttaacatgccccacaaagtttctatgtatatatt

SEQ ID NO: 92160 - DNA, 40 bp, Homo sapiens
atatatacatagaaactttgtggggcatgttaagttacag

SEQ ID NO: 92161 - DNA, 40 bp, Homo sapiens
ctgtaacttaacatgccccacaaagtttctatgtatatat

SEQ ID NO: 92162 - DNA, 40 bp, Homo sapiens
tatatacatagaaactttgtggggcatgttaagttacagt

SEQ ID NO: 92163 - DNA, 40 bp, Homo sapiens
actgtaacttaacatgccccacaaagtttctatgtatata

SEQ ID NO: 92164 - DNA, 40 bp, Homo sapiens
atatacatagaaactttgtggggcatgttaagttacagtt

SEQ ID NO: 92165 - DNA, 40 bp, Homo sapiens
aactgtaacttaacatgccccacaaagtttctatgtatat

SEQ ID NO: 92166 - DNA, 40 bp, Homo sapiens
tatacatagaaactttgtggggcatgttaagttacagttt

SEQ ID NO: 92167 - DNA, 40 bp, Homo sapiens
aaactgtaacttaacatgccccacaaagtttctatgtata

SEQ ID NO: 92168 - DNA, 40 bp, Homo sapiens
atacatagaaactttgtggggcatgttaagttacagtttg

SEQ ID NO: 92169 - DNA, 40 bp, Homo sapiens
caaactgtaacttaacatgccccacaaagtttctatgtat

SEQ ID NO: 92170 - DNA, 40 bp, Homo sapiens
tacatagaaactttgtggggcatgttaagttacagtttgc

SEQ ID NO: 92171 - DNA, 40 bp, Homo sapiens
gcaaactgtaacttaacatgccccacaaagtttctatgta

SEQ ID NO: 92172 - DNA, 40 bp, Homo sapiens
acatagaaactttgtggggcatgttaagttacagtttgca

SEQ ID NO: 92173 - DNA, 40 bp, Homo sapiens
tgcaaactgtaacttaacatgccccacaaagtttctatgt

SEQ ID NO: 92174 - DNA, 40 bp, Homo sapiens
catagaaactttgtggggcatgttaagttacagtttgcac

SEQ ID NO: 92175 - DNA, 40 bp, Homo sapiens
gtgcaaactgtaacttaacatgccccacaaagtttctatg

SEQ ID NO: 92176 - DNA, 40 bp, Homo sapiens
atagaaactttgtggggcatgttaagttacagtttgcaca

SEQ ID NO: 92177 - DNA, 40 bp, Homo sapiens
tgtgcaaactgtaacttaacatgccccacaaagtttctat

SEQ ID NO: 92178 - DNA, 40 bp, Homo sapiens
tagaaactttgtggggcatgttaagttacagtttgcacaa

SEQ ID NO: 92179 - DNA, 40 bp, Homo sapiens
ttgtgcaaactgtaacttaacatgccccacaaagtttcta

SEQ ID NO: 92180 - DNA, 40 bp, Homo sapiens
agaaactttgtggggcatgttaagttacagtttgcacaag

SEQ ID NO: 92181 - DNA, 40 bp, Homo sapiens
cttgtgcaaactgtaacttaacatgccccacaaagtttct

SEQ ID NO: 92182 - DNA, 40 bp, Homo sapiens
gaaactttgtggggcatgttaagttacagtttgcacaagt

SEQ ID NO: 92183 - DNA, 40 bp, Homo sapiens
acttgtgcaaactgtaacttaacatgccccacaaagtttc

SEQ ID NO: 92184 - DNA, 40 bp, Homo sapiens
aaactttgtggggcatgttaagttacagtttgcacaagtt

SEQ ID NO: 92185 - DNA, 40 bp, Homo sapiens
aacttgtgcaaactgtaacttaacatgccccacaaagttt

SEQ ID NO: 92186 - DNA, 40 bp, Homo sapiens
aactttgtggggcatgttaagttacagtttgcacaagttc

SEQ ID NO: 92187 - DNA, 40 bp, Homo sapiens
gaacttgtgcaaactgtaacttaacatgccccacaaagtt

SEQ ID NO: 92188 - DNA, 40 bp, Homo sapiens
actttgtggggcatgttaagttacagtttgcacaagttca

SEQ ID NO: 92189 - DNA, 40 bp, Homo sapiens
tgaacttgtgcaaactgtaacttaacatgccccacaaagt

SEQ ID NO: 92190 - DNA, 40 bp, Homo sapiens
ctttgtggggcatgttaagttacagtttgcacaagttcat

SEQ ID NO: 92191 - DNA, 40 bp, Homo sapiens
atgaacttgtgcaaactgtaacttaacatgccccacaaag

SEQ ID NO: 92192 - DNA, 40 bp, Homo sapiens
tttgtggggcatgttaagttacagtttgcacaagttcatc

SEQ ID NO: 92193 - DNA, 40 bp, Homo sapiens
gatgaacttgtgcaaactgtaacttaacatgccccacaaa

SEQ ID NO: 92194 - DNA, 40 bp, Homo sapiens
ttgtggggcatgttaagttacagtttgcacaagttcatct

SEQ ID NO: 92195 - DNA, 40 bp, Homo sapiens
agatgaacttgtgcaaactgtaacttaacatgccccacaa

SEQ ID NO: 92196 - DNA, 40 bp, Homo sapiens
tgtggggcatgttaagttacagtttgcacaagttcatctc

SEQ ID NO: 92197 - DNA, 40 bp, Homo sapiens
gagatgaacttgtgcaaactgtaacttaacatgccccaca

SEQ ID NO: 92198 - DNA, 40 bp, Homo sapiens
gtggggcatgttaagttacagtttgcacaagttcatctca

SEQ ID NO: 92199 - DNA, 40 bp, Homo sapiens
tgagatgaacttgtgcaaactgtaacttaacatgccccac

SEQ ID NO: 92200 - DNA, 40 bp, Homo sapiens
tggggcatgttaagttacagtttgcacaagttcatctcat

SEQ ID NO: 92201 - DNA, 40 bp, Homo sapiens
atgagatgaacttgtgcaaactgtaacttaacatgcccca

SEQ ID NO: 92202 - DNA, 40 bp, Homo sapiens
ggggcatgttaagttacagtttgcacaagttcatctcatt

SEQ ID NO: 92203 - DNA, 40 bp, Homo sapiens
aatgagatgaacttgtgcaaactgtaacttaacatgcccc

SEQ ID NO: 92204 - DNA, 40 bp, Homo sapiens
gggcatgttaagttacagtttgcacaagttcatctcattt

SEQ ID NO: 92205 - DNA, 40 bp, Homo sapiens
aaatgagatgaacttgtgcaaactgtaacttaacatgccc

SEQ ID NO: 92206 - DNA, 40 bp, Homo sapiens
ggcatgttaagttacagtttgcacaagttcatctcatttg

SEQ ID NO: 92207 - DNA, 40 bp, Homo sapiens
caaatgagatgaacttgtgcaaactgtaacttaacatgcc

SEQ ID NO: 92208 - DNA, 40 bp, Homo sapiens
gcatgttaagttacagtttgcacaagttcatctcatttgt

SEQ ID NO: 92209 - DNA, 40 bp, Homo sapiens
acaaatgagatgaacttgtgcaaactgtaacttaacatgc

SEQ ID NO: 92210 - DNA, 40 bp, Homo sapiens
catgttaagttacagtttgcacaagttcatctcatttgta

SEQ ID NO: 92211 - DNA, 40 bp, Homo sapiens
tacaaatgagatgaacttgtgcaaactgtaacttaacatg

SEQ ID NO: 92212 - DNA, 40 bp, Homo sapiens
atgttaagttacagtttgcacaagttcatctcatttgtat

SEQ ID NO: 92213 - DNA, 40 bp, Homo sapiens
atacaaatgagatgaacttgtgcaaactgtaacttaacat

SEQ ID NO: 92214 - DNA, 40 bp, Homo sapiens
tgttaagttacagtttgcacaagttcatctcatttgtatt

SEQ ID NO: 92215 - DNA, 40 bp, Homo sapiens
aatacaaatgagatgaacttgtgcaaactgtaacttaaca

SEQ ID NO: 92216 - DNA, 40 bp, Homo sapiens
gttaagttacagtttgcacaagttcatctcatttgtattc

SEQ ID NO: 92217 - DNA, 40 bp, Homo sapiens
gaatacaaatgagatgaacttgtgcaaactgtaacttaac

SEQ ID NO: 92218 - DNA, 40 bp, Homo sapiens
ttaagttacagtttgcacaagttcatctcatttgtattcc

SEQ ID NO: 92219 - DNA, 40 bp, Homo sapiens
ggaatacaaatgagatgaacttgtgcaaactgtaacttaa

SEQ ID NO: 92220 - DNA, 40 bp, Homo sapiens
taagttacagtttgcacaagttcatctcatttgtattcca

SEQ ID NO: 92221 - DNA, 40 bp, Homo sapiens
tggaatacaaatgagatgaacttgtgcaaactgtaactta

SEQ ID NO: 92222 - DNA, 40 bp, Homo sapiens
aagttacagtttgcacaagttcatctcatttgtattccat

SEQ ID NO: 92223 - DNA, 40 bp, Homo sapiens
atggaatacaaatgagatgaacttgtgcaaactgtaactt

SEQ ID NO: 92224 - DNA, 40 bp, Homo sapiens
agttacagtttgcacaagttcatctcatttgtattccatt

SEQ ID NO: 92225 - DNA, 40 bp, Homo sapiens
aatggaatacaaatgagatgaacttgtgcaaactgtaact

SEQ ID NO: 92226 - DNA, 40 bp, Homo sapiens
gttacagtttgcacaagttcatctcatttgtattccattg

SEQ ID NO: 92227 - DNA, 40 bp, Homo sapiens
caatggaatacaaatgagatgaacttgtgcaaactgtaac

SEQ ID NO: 92228 - DNA, 40 bp, Homo sapiens
ttacagtttgcacaagttcatctcatttgtattccattga

SEQ ID NO: 92229 - DNA, 40 bp, Homo sapiens
tcaatggaatacaaatgagatgaacttgtgcaaactgtaa

SEQ ID NO: 92230 - DNA, 40 bp, Homo sapiens
tacagtttgcacaagttcatctcatttgtattccattgat

SEQ ID NO: 92231 - DNA, 40 bp, Homo sapiens
atcaatggaatacaaatgagatgaacttgtgcaaactgta

SEQ ID NO: 92232 - DNA, 40 bp, Homo sapiens
acagtttgcacaagttcatctcatttgtattccattgatt

SEQ ID NO: 92233 - DNA, 40 bp, Homo sapiens
aatcaatggaatacaaatgagatgaacttgtgcaaactgt

SEQ ID NO: 92234 - DNA, 40 bp, Homo sapiens
cagtttgcacaagttcatctcatttgtattccattgattt

SEQ ID NO: 92235 - DNA, 40 bp, Homo sapiens
aaatcaatggaatacaaatgagatgaacttgtgcaaactg

SEQ ID NO: 92236 - DNA, 40 bp, Homo sapiens
agtttgcacaagttcatctcatttgtattccattgatttt

SEQ ID NO: 92237 - DNA, 40 bp, Homo sapiens
aaaatcaatggaatacaaatgagatgaacttgtgcaaact

SEQ ID NO: 92238 - DNA, 40 bp, Homo sapiens
gtttgcacaagttcatctcatttgtattccattgattttt

SEQ ID NO: 92239 - DNA, 40 bp, Homo sapiens
aaaaatcaatggaatacaaatgagatgaacttgtgcaaac

SEQ ID NO: 92240 - DNA, 40 bp, Homo sapiens
tttgcacaagttcatctcatttgtattccattgatttttt

SEQ ID NO: 92241 - DNA, 40 bp, Homo sapiens
aaaaaatcaatggaatacaaatgagatgaacttgtgcaaa

SEQ ID NO: 92242 - DNA, 40 bp, Homo sapiens
ttgcacaagttcatctcatttgtattccattgattttttt

SEQ ID NO: 92243 - DNA, 40 bp, Homo sapiens
aaaaaaatcaatggaatacaaatgagatgaacttgtgcaa

SEQ ID NO: 92244 - DNA, 40 bp, Homo sapiens
tgcacaagttcatctcatttgtattccattgatttttttt

SEQ ID NO: 92245 - DNA, 40 bp, Homo sapiens
aaaaaaaatcaatggaatacaaatgagatgaacttgtgca

SEQ ID NO: 92246 - DNA, 40 bp, Homo sapiens
gcacaagttcatctcatttgtattccattgattttttttt

SEQ ID NO: 92247 - DNA, 40 bp, Homo sapiens
aaaaaaaaatcaatggaatacaaatgagatgaacttgtgc

SEQ ID NO: 92248 - DNA, 40 bp, Homo sapiens
cacaagttcatctcatttgtattccattgatttttttttt

SEQ ID NO: 92249 - DNA, 40 bp, Homo sapiens
aaaaaaaaaatcaatggaatacaaatgagatgaacttgtg

SEQ ID NO: 92250 - DNA, 40 bp, Homo sapiens
acaagttcatctcatttgtattccattgattttttttttc

SEQ ID NO: 92251 - DNA, 40 bp, Homo sapiens
gaaaaaaaaaatcaatggaatacaaatgagatgaacttgt

SEQ ID NO: 92252 - DNA, 40 bp, Homo sapiens
caagttcatctcatttgtattccattgattttttttttct

SEQ ID NO: 92253 - DNA, 40 bp, Homo sapiens
agaaaaaaaaaatcaatggaatacaaatgagatgaacttg

SEQ ID NO: 92254 - DNA, 40 bp, Homo sapiens
aagttcatctcatttgtattccattgattttttttttctt

SEQ ID NO: 92255 - DNA, 40 bp, Homo sapiens
aagaaaaaaaaaatcaatggaatacaaatgagatgaactt

SEQ ID NO: 92256 - DNA, 40 bp, Homo sapiens
agttcatctcatttgtattccattgattttttttttcttc

SEQ ID NO: 92257 - DNA, 40 bp, Homo sapiens
gaagaaaaaaaaaatcaatggaatacaaatgagatgaact

SEQ ID NO: 92258 - DNA, 40 bp, Homo sapiens
gttcatctcatttgtattccattgattttttttttcttct

SEQ ID NO: 92259 - DNA, 40 bp, Homo sapiens
agaagaaaaaaaaaatcaatggaatacaaatgagatgaac

SEQ ID NO: 92260 - DNA, 40 bp, Homo sapiens
ttcatctcatttgtattccattgattttttttttcttcta

SEQ ID NO: 92261 - DNA, 40 bp, Homo sapiens
tagaagaaaaaaaaaatcaatggaatacaaatgagatgaa

SEQ ID NO: 92262 - DNA, 40 bp, Homo sapiens
tcatctcatttgtattccattgattttttttttcttctaa

SEQ ID NO: 92263 - DNA, 40 bp, Homo sapiens
ttagaagaaaaaaaaaatcaatggaatacaaatgagatga

SEQ ID NO: 92264 - DNA, 40 bp, Homo sapiens
catctcatttgtattccattgattttttttttcttctaaa

SEQ ID NO: 92265 - DNA, 40 bp, Homo sapiens
tttagaagaaaaaaaaaatcaatggaatacaaatgagatg

SEQ ID NO: 92266 - DNA, 40 bp, Homo sapiens
atctcatttgtattccattgattttttttttcttctaaac

SEQ ID NO: 92267 - DNA, 40 bp, Homo sapiens
gtttagaagaaaaaaaaaatcaatggaatacaaatgagat

SEQ ID NO: 92268 - DNA, 40 bp, Homo sapiens
tctcatttgtattccattgattttttttttcttctaaaca

SEQ ID NO: 92269 - DNA, 40 bp, Homo sapiens
tgtttagaagaaaaaaaaaatcaatggaatacaaatgaga

SEQ ID NO: 92270 - DNA, 40 bp, Homo sapiens
ctcatttgtattccattgattttttttttcttctaaacat

SEQ ID NO: 92271 - DNA, 40 bp, Homo sapiens
atgtttagaagaaaaaaaaaatcaatggaatacaaatgag

SEQ ID NO: 92272 - DNA, 40 bp, Homo sapiens
tcatttgtattccattgattttttttttcttctaaacatt

SEQ ID NO: 92273 - DNA, 40 bp, Homo sapiens
aatgtttagaagaaaaaaaaaatcaatggaatacaaatga

SEQ ID NO: 92274 - DNA, 40 bp, Homo sapiens
catttgtattccattgattttttttttcttctaaacattt

SEQ ID NO: 92275 - DNA, 40 bp, Homo sapiens
aaatgtttagaagaaaaaaaaaatcaatggaatacaaatg

SEQ ID NO: 92276 - DNA, 40 bp, Homo sapiens
atttgtattccattgattttttttttcttctaaacatttt

SEQ ID NO: 92277 - DNA, 40 bp, Homo sapiens
aaaatgtttagaagaaaaaaaaaatcaatggaatacaaat

SEQ ID NO: 92278 - DNA, 40 bp, Homo sapiens
tttgtattccattgattttttttttcttctaaacattttt

SEQ ID NO: 92279 - DNA, 40 bp, Homo sapiens
aaaaatgtttagaagaaaaaaaaaatcaatggaatacaaa

SEQ ID NO: 92280 - DNA, 40 bp, Homo sapiens
ttgtattccattgattttttttttcttctaaacatttttt

SEQ ID NO: 92281 - DNA, 40 bp, Homo sapiens
aaaaaatgtttagaagaaaaaaaaaatcaatggaatacaa

SEQ ID NO: 92282 - DNA, 40 bp, Homo sapiens
tgtattccattgattttttttttcttctaaacattttttc

SEQ ID NO: 92283 - DNA, 40 bp, Homo sapiens
gaaaaaatgtttagaagaaaaaaaaaatcaatggaataca

SEQ ID NO: 92284 - DNA, 40 bp, Homo sapiens
gtattccattgattttttttttcttctaaacattttttct

SEQ ID NO: 92285 - DNA, 40 bp, Homo sapiens
agaaaaaatgtttagaagaaaaaaaaaatcaatggaatac

SEQ ID NO: 92286 - DNA, 40 bp, Homo sapiens
tattccattgattttttttttcttctaaacattttttctt

SEQ ID NO: 92287 - DNA, 40 bp, Homo sapiens
aagaaaaaatgtttagaagaaaaaaaaaatcaatggaata

SEQ ID NO: 92288 - DNA, 40 bp, Homo sapiens
attccattgattttttttttcttctaaacattttttcttc

SEQ ID NO: 92289 - DNA, 40 bp, Homo sapiens
gaagaaaaaatgtttagaagaaaaaaaaaatcaatggaat

SEQ ID NO: 92290 - DNA, 40 bp, Homo sapiens
ttccattgattttttttttcttctaaacattttttcttca

SEQ ID NO: 92291 - DNA, 40 bp, Homo sapiens
tgaagaaaaaatgtttagaagaaaaaaaaaatcaatggaa

SEQ ID NO: 92292 - DNA, 40 bp, Homo sapiens
tccattgattttttttttcttctaaacattttttcttcaa

SEQ ID NO: 92293 - DNA, 40 bp, Homo sapiens
ttgaagaaaaaatgtttagaagaaaaaaaaaatcaatgga

SEQ ID NO: 92294 - DNA, 40 bp, Homo sapiens
ccattgattttttttttcttctaaacattttttcttcaaa

SEQ ID NO: 92295 - DNA, 40 bp, Homo sapiens
tttgaagaaaaaatgtttagaagaaaaaaaaaatcaatgg

SEQ ID NO: 92296 - DNA, 40 bp, Homo sapiens
cattgattttttttttcttctaaacattttttcttcaaac

SEQ ID NO: 92297 - DNA, 40 bp, Homo sapiens
gtttgaagaaaaaatgtttagaagaaaaaaaaaatcaatg

SEQ ID NO: 92298 - DNA, 40 bp, Homo sapiens
attgattttttttttcttctaaacattttttcttcaaaca

SEQ ID NO: 92299 - DNA, 40 bp, Homo sapiens
tgtttgaagaaaaaatgtttagaagaaaaaaaaaatcaat

SEQ ID NO: 92300 - DNA, 40 bp, Homo sapiens
ttgattttttttttcttctaaacattttttcttcaaacag

SEQ ID NO: 92301 - DNA, 40 bp, Homo sapiens
ctgtttgaagaaaaaatgtttagaagaaaaaaaaaatcaa

SEQ ID NO: 92302 - DNA, 40 bp, Homo sapiens
tgattttttttttcttctaaacattttttcttcaaacagt

SEQ ID NO: 92303 - DNA, 40 bp, Homo sapiens
actgtttgaagaaaaaatgtttagaagaaaaaaaaaatca

SEQ ID NO: 92304 - DNA, 40 bp, Homo sapiens
gattttttttttcttctaaacattttttcttcaaacagta

SEQ ID NO: 92305 - DNA, 40 bp, Homo sapiens
tactgtttgaagaaaaaatgtttagaagaaaaaaaaaatc

SEQ ID NO: 92306 - DNA, 40 bp, Homo sapiens
attttttttttcttctaaacattttttcttcaaacagtat

SEQ ID NO: 92307 - DNA, 40 bp, Homo sapiens
atactgtttgaagaaaaaatgtttagaagaaaaaaaaaat

SEQ ID NO: 92308 - DNA, 40 bp, Homo sapiens
ttttttttttcttctaaacattttttcttcaaacagtata

SEQ ID NO: 92309 - DNA, 40 bp, Homo sapiens
tatactgtttgaagaaaaaatgtttagaagaaaaaaaaaa

SEQ ID NO: 92310 - DNA, 40 bp, Homo sapiens
tttttttttcttctaaacattttttcttcaaacagtatat

SEQ ID NO: 92311 - DNA, 40 bp, Homo sapiens
atatactgtttgaagaaaaaatgtttagaagaaaaaaaaa

SEQ ID NO: 92312 - DNA, 40 bp, Homo sapiens
ttttttttcttctaaacattttttcttcaaacagtatata

SEQ ID NO: 92313 - DNA, 40 bp, Homo sapiens
tatatactgtttgaagaaaaaatgtttagaagaaaaaaaa

SEQ ID NO: 92314 - DNA, 40 bp, Homo sapiens
tttttttcttctaaacattttttcttcaaacagtatataa

SEQ ID NO: 92315 - DNA, 40 bp, Homo sapiens
ttatatactgtttgaagaaaaaatgtttagaagaaaaaaa

SEQ ID NO: 92316 - DNA, 40 bp, Homo sapiens
ttttttcttctaaacattttttcttcaaacagtatataac

SEQ ID NO: 92317 - DNA, 40 bp, Homo sapiens
gttatatactgtttgaagaaaaaatgtttagaagaaaaaa

SEQ ID NO: 92318 - DNA, 40 bp, Homo sapiens
tttttcttctaaacattttttcttcaaacagtatataact

SEQ ID NO: 92319 - DNA, 40 bp, Homo sapiens
agttatatactgtttgaagaaaaaatgtttagaagaaaaa

SEQ ID NO: 92320 - DNA, 40 bp, Homo sapiens
ttttcttctaaacattttttcttcaaacagtatataactt

SEQ ID NO: 92321 - DNA, 40 bp, Homo sapiens
aagttatatactgtttgaagaaaaaatgtttagaagaaaa

SEQ ID NO: 92322 - DNA, 40 bp, Homo sapiens
tttcttctaaacattttttcttcaaacagtatataacttt

SEQ ID NO: 92323 - DNA, 40 bp, Homo sapiens
aaagttatatactgtttgaagaaaaaatgtttagaagaaa

SEQ ID NO: 92324 - DNA, 40 bp, Homo sapiens
ttcttctaaacattttttcttcaaacagtatataactttt

SEQ ID NO: 92325 - DNA, 40 bp, Homo sapiens
aaaagttatatactgtttgaagaaaaaatgtttagaagaa

SEQ ID NO: 92326 - DNA, 40 bp, Homo sapiens
tcttctaaacattttttcttcaaacagtatataacttttt

SEQ ID NO: 92327 - DNA, 40 bp, Homo sapiens
aaaaagttatatactgtttgaagaaaaaatgtttagaaga

SEQ ID NO: 92328 - DNA, 40 bp, Homo sapiens
cttctaaacattttttcttcaaacagtatataactttttt

SEQ ID NO: 92329 - DNA, 40 bp, Homo sapiens
aaaaaagttatatactgtttgaagaaaaaatgtttagaag

SEQ ID NO: 92330 - DNA, 40 bp, Homo sapiens
ttctaaacattttttcttcaaacagtatataacttttttt

SEQ ID NO: 92331 - DNA, 40 bp, Homo sapiens
aaaaaaagttatatactgtttgaagaaaaaatgtttagaa

SEQ ID NO: 92332 - DNA, 40 bp, Homo sapiens
tctaaacattttttcttcaaacagtatataacttttttta

SEQ ID NO: 92333 - DNA, 40 bp, Homo sapiens
taaaaaaagttatatactgtttgaagaaaaaatgtttaga

SEQ ID NO: 92334 - DNA, 40 bp, Homo sapiens
ctaaacattttttcttcaaacagtatataactttttttag

SEQ ID NO: 92335 - DNA, 40 bp, Homo sapiens
ctaaaaaaagttatatactgtttgaagaaaaaatgtttag

SEQ ID NO: 92336 - DNA, 40 bp, Homo sapiens
taaacattttttcttcaaacagtatataactttttttagg

SEQ ID NO: 92337 - DNA, 40 bp, Homo sapiens
cctaaaaaaagttatatactgtttgaagaaaaaatgttta

SEQ ID NO: 92338 - DNA, 40 bp, Homo sapiens
aaacattttttcttcaaacagtatataactttttttaggg

SEQ ID NO: 92339 - DNA, 40 bp, Homo sapiens
ccctaaaaaaagttatatactgtttgaagaaaaaatgttt

SEQ ID NO: 92340 - DNA, 40 bp, Homo sapiens
aacattttttcttcaaacagtatataactttttttagggg

SEQ ID NO: 92341 - DNA, 40 bp, Homo sapiens
cccctaaaaaaagttatatactgtttgaagaaaaaatgtt

SEQ ID NO: 92342 - DNA, 40 bp, Homo sapiens
acattttttcttcaaacagtatataactttttttagggga

SEQ ID NO: 92343 - DNA, 40 bp, Homo sapiens
tcccctaaaaaaagttatatactgtttgaagaaaaaatgt

SEQ ID NO: 92344 - DNA, 40 bp, Homo sapiens
cattttttcttcaaacagtatataactttttttaggggat

SEQ ID NO: 92345 - DNA, 40 bp, Homo sapiens
atcccctaaaaaaagttatatactgtttgaagaaaaaatg

SEQ ID NO: 92346 - DNA, 40 bp, Homo sapiens
attttttcttcaaacagtatataactttttttaggggatt

SEQ ID NO: 92347 - DNA, 40 bp, Homo sapiens
aatcccctaaaaaaagttatatactgtttgaagaaaaaat

SEQ ID NO: 92348 - DNA, 40 bp, Homo sapiens
ttttttcttcaaacagtatataactttttttaggggattt

SEQ ID NO: 92349 - DNA, 40 bp, Homo sapiens
aaatcccctaaaaaaagttatatactgtttgaagaaaaaa

SEQ ID NO: 92350 - DNA, 40 bp, Homo sapiens
tttttcttcaaacagtatataactttttttaggggatttt

SEQ ID NO: 92351 - DNA, 40 bp, Homo sapiens
aaaatcccctaaaaaaagttatatactgtttgaagaaaaa

SEQ ID NO: 92352 - DNA, 40 bp, Homo sapiens
ttttcttcaaacagtatataactttttttaggggattttt

SEQ ID NO: 92353 - DNA, 40 bp, Homo sapiens
aaaaatcccctaaaaaaagttatatactgtttgaagaaaa

SEQ ID NO: 92354 - DNA, 40 bp, Homo sapiens
tttcttcaaacagtatataactttttttaggggatttttt

SEQ ID NO: 92355 - DNA, 40 bp, Homo sapiens
aaaaaatcccctaaaaaaagttatatactgtttgaagaaa

SEQ ID NO: 92356 - DNA, 40 bp, Homo sapiens
ttcttcaaacagtatataactttttttaggggattttttt

SEQ ID NO: 92357 - DNA, 40 bp, Homo sapiens
aaaaaaatcccctaaaaaaagttatatactgtttgaagaa

SEQ ID NO: 92358 - DNA, 40 bp, Homo sapiens
tcttcaaacagtatataactttttttaggggatttttttt

SEQ ID NO: 92359 - DNA, 40 bp, Homo sapiens
aaaaaaaatcccctaaaaaaagttatatactgtttgaaga

SEQ ID NO: 92360 - DNA, 40 bp, Homo sapiens
cttcaaacagtatataactttttttaggggattttttttt

SEQ ID NO: 92361 - DNA, 40 bp, Homo sapiens
aaaaaaaaatcccctaaaaaaagttatatactgtttgaag

SEQ ID NO: 92362 - DNA, 40 bp, Homo sapiens
ttcaaacagtatataactttttttaggggattttttttta

SEQ ID NO: 92363 - DNA, 40 bp, Homo sapiens
taaaaaaaaatcccctaaaaaaagttatatactgtttgaa

SEQ ID NO: 92364 - DNA, 40 bp, Homo sapiens
tcaaacagtatataactttttttaggggatttttttttag

SEQ ID NO: 92365 - DNA, 40 bp, Homo sapiens
ctaaaaaaaaatcccctaaaaaaagttatatactgtttga

SEQ ID NO: 92366 - DNA, 40 bp, Homo sapiens
caaacagtatataactttttttaggggatttttttttaga

SEQ ID NO: 92367 - DNA, 40 bp, Homo sapiens
tctaaaaaaaaatcccctaaaaaaagttatatactgtttg

SEQ ID NO: 92368 - DNA, 40 bp, Homo sapiens
aaacagtatataactttttttaggggatttttttttagac

SEQ ID NO: 92369 - DNA, 40 bp, Homo sapiens
gtctaaaaaaaaatcccctaaaaaaagttatatactgttt

SEQ ID NO: 92370 - DNA, 40 bp, Homo sapiens
aacagtatataactttttttaggggatttttttttagaca

SEQ ID NO: 92371 - DNA, 40 bp, Homo sapiens
tgtctaaaaaaaaatcccctaaaaaaagttatatactgtt

SEQ ID NO: 92372 - DNA, 40 bp, Homo sapiens
acagtatataactttttttaggggatttttttttagacag

SEQ ID NO: 92373 - DNA, 40 bp, Homo sapiens
ctgtctaaaaaaaaatcccctaaaaaaagttatatactgt

SEQ ID NO: 92374 - DNA, 40 bp, Homo sapiens
cagtatataactttttttaggggatttttttttagacagc

SEQ ID NO: 92375 - DNA, 40 bp, Homo sapiens
gctgtctaaaaaaaaatcccctaaaaaaagttatatactg

SEQ ID NO: 92376 - DNA, 40 bp, Homo sapiens
agtatataactttttttaggggatttttttttagacagca

SEQ ID NO: 92377 - DNA, 40 bp, Homo sapiens
tgctgtctaaaaaaaaatcccctaaaaaaagttatatact

SEQ ID NO: 92378 - DNA, 40 bp, Homo sapiens
gtatataactttttttaggggatttttttttagacagcaa

SEQ ID NO: 92379 - DNA, 40 bp, Homo sapiens
ttgctgtctaaaaaaaaatcccctaaaaaaagttatatac

SEQ ID NO: 92380 - DNA, 40 bp, Homo sapiens
tatataactttttttaggggatttttttttagacagcaaa

SEQ ID NO: 92381 - DNA, 40 bp, Homo sapiens
tttgctgtctaaaaaaaaatcccctaaaaaaagttatata

SEQ ID NO: 92382 - DNA, 40 bp, Homo sapiens
atataactttttttaggggatttttttttagacagcaaaa

SEQ ID NO: 92383 - DNA, 40 bp, Homo sapiens
ttttgctgtctaaaaaaaaatcccctaaaaaaagttatat

SEQ ID NO: 92384 - DNA, 40 bp, Homo sapiens
tataactttttttaggggatttttttttagacagcaaaaa

SEQ ID NO: 92385 - DNA, 40 bp, Homo sapiens
tttttgctgtctaaaaaaaaatcccctaaaaaaagttata

SEQ ID NO: 92386 - DNA, 40 bp, Homo sapiens
ataactttttttaggggatttttttttagacagcaaaaac

SEQ ID NO: 92387 - DNA, 40 bp, Homo sapiens
gtttttgctgtctaaaaaaaaatcccctaaaaaaagttat

SEQ ID NO: 92388 - DNA, 40 bp, Homo sapiens
taactttttttaggggatttttttttagacagcaaaaact

SEQ ID NO: 92389 - DNA, 40 bp, Homo sapiens
agtttttgctgtctaaaaaaaaatcccctaaaaaaagtta

SEQ ID NO: 92390 - DNA, 40 bp, Homo sapiens
aactttttttaggggatttttttttagacagcaaaaacta

SEQ ID NO: 92391 - DNA, 40 bp, Homo sapiens
tagtttttgctgtctaaaaaaaaatcccctaaaaaaagtt

SEQ ID NO: 92392 - DNA, 40 bp, Homo sapiens
actttttttaggggatttttttttagacagcaaaaactat

SEQ ID NO: 92393 - DNA, 40 bp, Homo sapiens
atagtttttgctgtctaaaaaaaaatcccctaaaaaaagt

SEQ ID NO: 92394 - DNA, 40 bp, Homo sapiens
ctttttttaggggatttttttttagacagcaaaaactatc

SEQ ID NO: 92395 - DNA, 40 bp, Homo sapiens
gatagtttttgctgtctaaaaaaaaatcccctaaaaaaag

SEQ ID NO: 92396 - DNA, 40 bp, Homo sapiens
tttttttaggggatttttttttagacagcaaaaactatct

SEQ ID NO: 92397 - DNA, 40 bp, Homo sapiens
agatagtttttgctgtctaaaaaaaaatcccctaaaaaaa

SEQ ID NO: 92398 - DNA, 40 bp, Homo sapiens
ttttttaggggatttttttttagacagcaaaaactatctg

SEQ ID NO: 92399 - DNA, 40 bp, Homo sapiens
cagatagtttttgctgtctaaaaaaaaatcccctaaaaaa

SEQ ID NO: 92400 - DNA, 40 bp, Homo sapiens
tttttaggggatttttttttagacagcaaaaactatctga

SEQ ID NO: 92401 - DNA, 40 bp, Homo sapiens
tcagatagtttttgctgtctaaaaaaaaatcccctaaaaa

SEQ ID NO: 92402 - DNA, 40 bp, Homo sapiens
ttttaggggatttttttttagacagcaaaaactatctgaa

SEQ ID NO: 92403 - DNA, 40 bp, Homo sapiens
ttcagatagtttttgctgtctaaaaaaaaatcccctaaaa

SEQ ID NO: 92404 - DNA, 40 bp, Homo sapiens
tttaggggatttttttttagacagcaaaaactatctgaag

SEQ ID NO: 92405 - DNA, 40 bp, Homo sapiens
cttcagatagtttttgctgtctaaaaaaaaatcccctaaa

SEQ ID NO: 92406 - DNA, 40 bp, Homo sapiens
ttaggggatttttttttagacagcaaaaactatctgaaga

SEQ ID NO: 92407 - DNA, 40 bp, Homo sapiens
tcttcagatagtttttgctgtctaaaaaaaaatcccctaa

SEQ ID NO: 92408 - DNA, 40 bp, Homo sapiens
taggggatttttttttagacagcaaaaactatctgaagat

SEQ ID NO: 92409 - DNA, 40 bp, Homo sapiens
atcttcagatagtttttgctgtctaaaaaaaaatccccta

SEQ ID NO: 92410 - DNA, 40 bp, Homo sapiens
aggggatttttttttagacagcaaaaactatctgaagatt

SEQ ID NO: 92411 - DNA, 40 bp, Homo sapiens
aatcttcagatagtttttgctgtctaaaaaaaaatcccct

SEQ ID NO: 92412 - DNA, 40 bp, Homo sapiens
ggggatttttttttagacagcaaaaactatctgaagattt

SEQ ID NO: 92413 - DNA, 40 bp, Homo sapiens
aaatcttcagatagtttttgctgtctaaaaaaaaatcccc

SEQ ID NO: 92414 - DNA, 40 bp, Homo sapiens
gggatttttttttagacagcaaaaactatctgaagatttc

SEQ ID NO: 92415 - DNA, 40 bp, Homo sapiens
gaaatcttcagatagtttttgctgtctaaaaaaaaatccc

SEQ ID NO: 92416 - DNA, 40 bp, Homo sapiens
ggatttttttttagacagcaaaaactatctgaagatttcc

SEQ ID NO: 92417 - DNA, 40 bp, Homo sapiens
ggaaatcttcagatagtttttgctgtctaaaaaaaaatcc

SEQ ID NO: 92418 - DNA, 40 bp, Homo sapiens
gatttttttttagacagcaaaaactatctgaagatttcca

SEQ ID NO: 92419 - DNA, 40 bp, Homo sapiens
tggaaatcttcagatagtttttgctgtctaaaaaaaaatc

SEQ ID NO: 92420 - DNA, 40 bp, Homo sapiens
atttttttttagacagcaaaaactatctgaagatttccat

SEQ ID NO: 92421 - DNA, 40 bp, Homo sapiens
atggaaatcttcagatagtttttgctgtctaaaaaaaaat

SEQ ID NO: 92422 - DNA, 40 bp, Homo sapiens
tttttttttagacagcaaaaactatctgaagatttccatt

SEQ ID NO: 92423 - DNA, 40 bp, Homo sapiens
aatggaaatcttcagatagtttttgctgtctaaaaaaaaa

SEQ ID NO: 92424 - DNA, 40 bp, Homo sapiens
ttttttttagacagcaaaaactatctgaagatttccattt

SEQ ID NO: 92425 - DNA, 40 bp, Homo sapiens
aaatggaaatcttcagatagtttttgctgtctaaaaaaaa

SEQ ID NO: 92426 - DNA, 40 bp, Homo sapiens
tttttttagacagcaaaaactatctgaagatttccatttg

SEQ ID NO: 92427 - DNA, 40 bp, Homo sapiens
caaatggaaatcttcagatagtttttgctgtctaaaaaaa

SEQ ID NO: 92428 - DNA, 40 bp, Homo sapiens
ttttttagacagcaaaaactatctgaagatttccatttgt

SEQ ID NO: 92429 - DNA, 40 bp, Homo sapiens
acaaatggaaatcttcagatagtttttgctgtctaaaaaa

SEQ ID NO: 92430 - DNA, 40 bp, Homo sapiens
tttttagacagcaaaaactatctgaagatttccatttgtc

SEQ ID NO: 92431 - DNA, 40 bp, Homo sapiens
gacaaatggaaatcttcagatagtttttgctgtctaaaaa

SEQ ID NO: 92432 - DNA, 40 bp, Homo sapiens
ttttagacagcaaaaactatctgaagatttccatttgtca

SEQ ID NO: 92433 - DNA, 40 bp, Homo sapiens
tgacaaatggaaatcttcagatagtttttgctgtctaaaa

SEQ ID NO: 92434 - DNA, 40 bp, Homo sapiens
tttagacagcaaaaactatctgaagatttccatttgtcaa

SEQ ID NO: 92435 - DNA, 40 bp, Homo sapiens
ttgacaaatggaaatcttcagatagtttttgctgtctaaa

SEQ ID NO: 92436 - DNA, 40 bp, Homo sapiens
ttagacagcaaaaactatctgaagatttccatttgtcaaa

SEQ ID NO: 92437 - DNA, 40 bp, Homo sapiens
tttgacaaatggaaatcttcagatagtttttgctgtctaa

SEQ ID NO: 92438 - DNA, 40 bp, Homo sapiens
tagacagcaaaaactatctgaagatttccatttgtcaaaa

SEQ ID NO: 92439 - DNA, 40 bp, Homo sapiens
ttttgacaaatggaaatcttcagatagtttttgctgtcta

SEQ ID NO: 92440 - DNA, 40 bp, Homo sapiens
agacagcaaaaactatctgaagatttccatttgtcaaaaa

SEQ ID NO: 92441 - DNA, 40 bp, Homo sapiens
tttttgacaaatggaaatcttcagatagtttttgctgtct

SEQ ID NO: 92442 - DNA, 40 bp, Homo sapiens
gacagcaaaaactatctgaagatttccatttgtcaaaaag

SEQ ID NO: 92443 - DNA, 40 bp, Homo sapiens
ctttttgacaaatggaaatcttcagatagtttttgctgtc

SEQ ID NO: 92444 - DNA, 40 bp, Homo sapiens
acagcaaaaactatctgaagatttccatttgtcaaaaagt

SEQ ID NO: 92445 - DNA, 40 bp, Homo sapiens
actttttgacaaatggaaatcttcagatagtttttgctgt

SEQ ID NO: 92446 - DNA, 40 bp, Homo sapiens
cagcaaaaactatctgaagatttccatttgtcaaaaagta

SEQ ID NO: 92447 - DNA, 40 bp, Homo sapiens
tactttttgacaaatggaaatcttcagatagtttttgctg

SEQ ID NO: 92448 - DNA, 40 bp, Homo sapiens
agcaaaaactatctgaagatttccatttgtcaaaaagtaa

SEQ ID NO: 92449 - DNA, 40 bp, Homo sapiens
ttactttttgacaaatggaaatcttcagatagtttttgct

SEQ ID NO: 92450 - DNA, 40 bp, Homo sapiens
gcaaaaactatctgaagatttccatttgtcaaaaagtaat

SEQ ID NO: 92451 - DNA, 40 bp, Homo sapiens
attactttttgacaaatggaaatcttcagatagtttttgc

SEQ ID NO: 92452 - DNA, 40 bp, Homo sapiens
caaaaactatctgaagatttccatttgtcaaaaagtaatg

SEQ ID NO: 92453 - DNA, 40 bp, Homo sapiens
cattactttttgacaaatggaaatcttcagatagtttttg

SEQ ID NO: 92454 - DNA, 40 bp, Homo sapiens
aaaaactatctgaagatttccatttgtcaaaaagtaatga

SEQ ID NO: 92455 - DNA, 40 bp, Homo sapiens
tcattactttttgacaaatggaaatcttcagatagttttt

SEQ ID NO: 92456 - DNA, 40 bp, Homo sapiens
aaaactatctgaagatttccatttgtcaaaaagtaatgat

SEQ ID NO: 92457 - DNA, 40 bp, Homo sapiens
atcattactttttgacaaatggaaatcttcagatagtttt

SEQ ID NO: 92458 - DNA, 40 bp, Homo sapiens
aaactatctgaagatttccatttgtcaaaaagtaatgatt

SEQ ID NO: 92459 - DNA, 40 bp, Homo sapiens
aatcattactttttgacaaatggaaatcttcagatagttt

SEQ ID NO: 92460 - DNA, 40 bp, Homo sapiens
aactatctgaagatttccatttgtcaaaaagtaatgattt

SEQ ID NO: 92461 - DNA, 40 bp, Homo sapiens
aaatcattactttttgacaaatggaaatcttcagatagtt

SEQ ID NO: 92462 - DNA, 40 bp, Homo sapiens
actatctgaagatttccatttgtcaaaaagtaatgatttc

SEQ ID NO: 92463 - DNA, 40 bp, Homo sapiens
gaaatcattactttttgacaaatggaaatcttcagatagt

SEQ ID NO: 92464 - DNA, 40 bp, Homo sapiens
ctatctgaagatttccatttgtcaaaaagtaatgatttct

SEQ ID NO: 92465 - DNA, 40 bp, Homo sapiens
agaaatcattactttttgacaaatggaaatcttcagatag

SEQ ID NO: 92466 - DNA, 40 bp, Homo sapiens
tatctgaagatttccatttgtcaaaaagtaatgatttctt

SEQ ID NO: 92467 - DNA, 40 bp, Homo sapiens
aagaaatcattactttttgacaaatggaaatcttcagata

SEQ ID NO: 92468 - DNA, 40 bp, Homo sapiens
atctgaagatttccatttgtcaaaaagtaatgatttcttg

SEQ ID NO: 92469 - DNA, 40 bp, Homo sapiens
caagaaatcattactttttgacaaatggaaatcttcagat

SEQ ID NO: 92470 - DNA, 40 bp, Homo sapiens
tctgaagatttccatttgtcaaaaagtaatgatttcttga

SEQ ID NO: 92471 - DNA, 40 bp, Homo sapiens
tcaagaaatcattactttttgacaaatggaaatcttcaga

SEQ ID NO: 92472 - DNA, 40 bp, Homo sapiens
ctgaagatttccatttgtcaaaaagtaatgatttcttgat

SEQ ID NO: 92473 - DNA, 40 bp, Homo sapiens
atcaagaaatcattactttttgacaaatggaaatcttcag

SEQ ID NO: 92474 - DNA, 40 bp, Homo sapiens
tgaagatttccatttgtcaaaaagtaatgatttcttgata

SEQ ID NO: 92475 - DNA, 40 bp, Homo sapiens
tatcaagaaatcattactttttgacaaatggaaatcttca

SEQ ID NO: 92476 - DNA, 40 bp, Homo sapiens
gaagatttccatttgtcaaaaagtaatgatttcttgataa

SEQ ID NO: 92477 - DNA, 40 bp, Homo sapiens
ttatcaagaaatcattactttttgacaaatggaaatcttc

SEQ ID NO: 92478 - DNA, 40 bp, Homo sapiens
aagatttccatttgtcaaaaagtaatgatttcttgataat

SEQ ID NO: 92479 - DNA, 40 bp, Homo sapiens
attatcaagaaatcattactttttgacaaatggaaatctt

SEQ ID NO: 92480 - DNA, 40 bp, Homo sapiens
agatttccatttgtcaaaaagtaatgatttcttgataatt

SEQ ID NO: 92481 - DNA, 40 bp, Homo sapiens
aattatcaagaaatcattactttttgacaaatggaaatct

SEQ ID NO: 92482 - DNA, 40 bp, Homo sapiens
gatttccatttgtcaaaaagtaatgatttcttgataattg

SEQ ID NO: 92483 - DNA, 40 bp, Homo sapiens
caattatcaagaaatcattactttttgacaaatggaaatc

SEQ ID NO: 92484 - DNA, 40 bp, Homo sapiens
atttccatttgtcaaaaagtaatgatttcttgataattgt

SEQ ID NO: 92485 - DNA, 40 bp, Homo sapiens
acaattatcaagaaatcattactttttgacaaatggaaat

SEQ ID NO: 92486 - DNA, 40 bp, Homo sapiens
tttccatttgtcaaaaagtaatgatttcttgataattgtg

SEQ ID NO: 92487 - DNA, 40 bp, Homo sapiens
cacaattatcaagaaatcattactttttgacaaatggaaa

SEQ ID NO: 92488 - DNA, 40 bp, Homo sapiens
ttccatttgtcaaaaagtaatgatttcttgataattgtgt

SEQ ID NO: 92489 - DNA, 40 bp, Homo sapiens
acacaattatcaagaaatcattactttttgacaaatggaa

SEQ ID NO: 92490 - DNA, 40 bp, Homo sapiens
tccatttgtcaaaaagtaatgatttcttgataattgtgta

SEQ ID NO: 92491 - DNA, 40 bp, Homo sapiens
tacacaattatcaagaaatcattactttttgacaaatgga

SEQ ID NO: 92492 - DNA, 40 bp, Homo sapiens
ccatttgtcaaaaagtaatgatttcttgataattgtgtag

SEQ ID NO: 92493 - DNA, 40 bp, Homo sapiens
ctacacaattatcaagaaatcattactttttgacaaatgg

SEQ ID NO: 92494 - DNA, 40 bp, Homo sapiens
catttgtcaaaaagtaatgatttcttgataattgtgtagt

SEQ ID NO: 92495 - DNA, 40 bp, Homo sapiens
actacacaattatcaagaaatcattactttttgacaaatg

SEQ ID NO: 92496 - DNA, 40 bp, Homo sapiens
atttgtcaaaaagtaatgatttcttgataattgtgtagta

SEQ ID NO: 92497 - DNA, 40 bp, Homo sapiens
tactacacaattatcaagaaatcattactttttgacaaat

SEQ ID NO: 92498 - DNA, 40 bp, Homo sapiens
tttgtcaaaaagtaatgatttcttgataattgtgtagtaa

SEQ ID NO: 92499 - DNA, 40 bp, Homo sapiens
ttactacacaattatcaagaaatcattactttttgacaaa

SEQ ID NO: 92500 - DNA, 40 bp, Homo sapiens
ttgtcaaaaagtaatgatttcttgataattgtgtagtaat

SEQ ID NO: 92501 - DNA, 40 bp, Homo sapiens
attactacacaattatcaagaaatcattactttttgacaa

SEQ ID NO: 92502 - DNA, 40 bp, Homo sapiens
tgtcaaaaagtaatgatttcttgataattgtgtagtaatg

SEQ ID NO: 92503 - DNA, 40 bp, Homo sapiens
cattactacacaattatcaagaaatcattactttttgaca

SEQ ID NO: 92504 - DNA, 40 bp, Homo sapiens
gtcaaaaagtaatgatttcttgataattgtgtagtaatgt

SEQ ID NO: 92505 - DNA, 40 bp, Homo sapiens
acattactacacaattatcaagaaatcattactttttgac

SEQ ID NO: 92506 - DNA, 40 bp, Homo sapiens
tcaaaaagtaatgatttcttgataattgtgtagtaatgtt

SEQ ID NO: 92507 - DNA, 40 bp, Homo sapiens
aacattactacacaattatcaagaaatcattactttttga

SEQ ID NO: 92508 - DNA, 40 bp, Homo sapiens
caaaaagtaatgatttcttgataattgtgtagtaatgttt

SEQ ID NO: 92509 - DNA, 40 bp, Homo sapiens
aaacattactacacaattatcaagaaatcattactttttg

SEQ ID NO: 92510 - DNA, 40 bp, Homo sapiens
aaaaagtaatgatttcttgataattgtgtagtaatgtttt

SEQ ID NO: 92511 - DNA, 40 bp, Homo sapiens
aaaacattactacacaattatcaagaaatcattacttttt

SEQ ID NO: 92512 - DNA, 40 bp, Homo sapiens
aaaagtaatgatttcttgataattgtgtagtaatgttttt

SEQ ID NO: 92513 - DNA, 40 bp, Homo sapiens
aaaaacattactacacaattatcaagaaatcattactttt

SEQ ID NO: 92514 - DNA, 40 bp, Homo sapiens
aaagtaatgatttcttgataattgtgtagtaatgtttttt

SEQ ID NO: 92515 - DNA, 40 bp, Homo sapiens
aaaaaacattactacacaattatcaagaaatcattacttt

SEQ ID NO: 92516 - DNA, 40 bp, Homo sapiens
aagtaatgatttcttgataattgtgtagtaatgtttttta

SEQ ID NO: 92517 - DNA, 40 bp, Homo sapiens
taaaaaacattactacacaattatcaagaaatcattactt

SEQ ID NO: 92518 - DNA, 40 bp, Homo sapiens
agtaatgatttcttgataattgtgtagtaatgttttttag

SEQ ID NO: 92519 - DNA, 40 bp, Homo sapiens
ctaaaaaacattactacacaattatcaagaaatcattact

SEQ ID NO: 92520 - DNA, 40 bp, Homo sapiens
gtaatgatttcttgataattgtgtagtaatgttttttaga

SEQ ID NO: 92521 - DNA, 40 bp, Homo sapiens
tctaaaaaacattactacacaattatcaagaaatcattac

SEQ ID NO: 92522 - DNA, 40 bp, Homo sapiens
taatgatttcttgataattgtgtagtaatgttttttagaa

SEQ ID NO: 92523 - DNA, 40 bp, Homo sapiens
ttctaaaaaacattactacacaattatcaagaaatcatta

SEQ ID NO: 92524 - DNA, 40 bp, Homo sapiens
aatgatttcttgataattgtgtagtaatgttttttagaac

SEQ ID NO: 92525 - DNA, 40 bp, Homo sapiens
gttctaaaaaacattactacacaattatcaagaaatcatt

SEQ ID NO: 92526 - DNA, 40 bp, Homo sapiens
atgatttcttgataattgtgtagtaatgttttttagaacc

SEQ ID NO: 92527 - DNA, 40 bp, Homo sapiens
ggttctaaaaaacattactacacaattatcaagaaatcat

SEQ ID NO: 92528 - DNA, 40 bp, Homo sapiens
tgatttcttgataattgtgtagtaatgttttttagaaccc

SEQ ID NO: 92529 - DNA, 40 bp, Homo sapiens
gggttctaaaaaacattactacacaattatcaagaaatca

SEQ ID NO: 92530 - DNA, 40 bp, Homo sapiens
gatttcttgataattgtgtagtaatgttttttagaaccca

SEQ ID NO: 92531 - DNA, 40 bp, Homo sapiens
tgggttctaaaaaacattactacacaattatcaagaaatc

SEQ ID NO: 92532 - DNA, 40 bp, Homo sapiens
atttcttgataattgtgtagtaatgttttttagaacccag

SEQ ID NO: 92533 - DNA, 40 bp, Homo sapiens
ctgggttctaaaaaacattactacacaattatcaagaaat

SEQ ID NO: 92534 - DNA, 40 bp, Homo sapiens
tttcttgataattgtgtagtaatgttttttagaacccagc

SEQ ID NO: 92535 - DNA, 40 bp, Homo sapiens
gctgggttctaaaaaacattactacacaattatcaagaaa

SEQ ID NO: 92536 - DNA, 40 bp, Homo sapiens
ttcttgataattgtgtagtaatgttttttagaacccagca

SEQ ID NO: 92537 - DNA, 40 bp, Homo sapiens
tgctgggttctaaaaaacattactacacaattatcaagaa

SEQ ID NO: 92538 - DNA, 40 bp, Homo sapiens
tcttgataattgtgtagtaatgttttttagaacccagcag

SEQ ID NO: 92539 - DNA, 40 bp, Homo sapiens
ctgctgggttctaaaaaacattactacacaattatcaaga

SEQ ID NO: 92540 - DNA, 40 bp, Homo sapiens
cttgataattgtgtagtaatgttttttagaacccagcagt

SEQ ID NO: 92541 - DNA, 40 bp, Homo sapiens
actgctgggttctaaaaaacattactacacaattatcaag

SEQ ID NO: 92542 - DNA, 40 bp, Homo sapiens
ttgataattgtgtagtaatgttttttagaacccagcagtt

SEQ ID NO: 92543 - DNA, 40 bp, Homo sapiens
aactgctgggttctaaaaaacattactacacaattatcaa

SEQ ID NO: 92544 - DNA, 40 bp, Homo sapiens
tgataattgtgtagtaatgttttttagaacccagcagtta

SEQ ID NO: 92545 - DNA, 40 bp, Homo sapiens
taactgctgggttctaaaaaacattactacacaattatca

SEQ ID NO: 92546 - DNA, 40 bp, Homo sapiens
gataattgtgtagtaatgttttttagaacccagcagttac

SEQ ID NO: 92547 - DNA, 40 bp, Homo sapiens
gtaactgctgggttctaaaaaacattactacacaattatc

SEQ ID NO: 92548 - DNA, 40 bp, Homo sapiens
ataattgtgtagtaatgttttttagaacccagcagttacc

SEQ ID NO: 92549 - DNA, 40 bp, Homo sapiens
ggtaactgctgggttctaaaaaacattactacacaattat

SEQ ID NO: 92550 - DNA, 40 bp, Homo sapiens
taattgtgtagtaatgttttttagaacccagcagttacct

SEQ ID NO: 92551 - DNA, 40 bp, Homo sapiens
aggtaactgctgggttctaaaaaacattactacacaatta

SEQ ID NO: 92552 - DNA, 40 bp, Homo sapiens
aattgtgtagtaatgttttttagaacccagcagttacctt

SEQ ID NO: 92553 - DNA, 40 bp, Homo sapiens
aaggtaactgctgggttctaaaaaacattactacacaatt

SEQ ID NO: 92554 - DNA, 40 bp, Homo sapiens
attgtgtagtaatgttttttagaacccagcagttacctta

SEQ ID NO: 92555 - DNA, 40 bp, Homo sapiens
taaggtaactgctgggttctaaaaaacattactacacaat

SEQ ID NO: 92556 - DNA, 40 bp, Homo sapiens
ttgtgtagtaatgttttttagaacccagcagttaccttaa

SEQ ID NO: 92557 - DNA, 40 bp, Homo sapiens
ttaaggtaactgctgggttctaaaaaacattactacacaa

SEQ ID NO: 92558 - DNA, 40 bp, Homo sapiens
tgtgtagtaatgttttttagaacccagcagttaccttaaa

SEQ ID NO: 92559 - DNA, 40 bp, Homo sapiens
tttaaggtaactgctgggttctaaaaaacattactacaca

SEQ ID NO: 92560 - DNA, 40 bp, Homo sapiens
gtgtagtaatgttttttagaacccagcagttaccttaaag

SEQ ID NO: 92561 - DNA, 40 bp, Homo sapiens
ctttaaggtaactgctgggttctaaaaaacattactacac

SEQ ID NO: 92562 - DNA, 40 bp, Homo sapiens
tgtagtaatgttttttagaacccagcagttaccttaaagc

SEQ ID NO: 92563 - DNA, 40 bp, Homo sapiens
gctttaaggtaactgctgggttctaaaaaacattactaca

SEQ ID NO: 92564 - DNA, 40 bp, Homo sapiens
gtagtaatgttttttagaacccagcagttaccttaaagct

SEQ ID NO: 92565 - DNA, 40 bp, Homo sapiens
agctttaaggtaactgctgggttctaaaaaacattactac

SEQ ID NO: 92566 - DNA, 40 bp, Homo sapiens
tagtaatgttttttagaacccagcagttaccttaaagctg

SEQ ID NO: 92567 - DNA, 40 bp, Homo sapiens
cagctttaaggtaactgctgggttctaaaaaacattacta

SEQ ID NO: 92568 - DNA, 40 bp, Homo sapiens
agtaatgttttttagaacccagcagttaccttaaagctga

SEQ ID NO: 92569 - DNA, 40 bp, Homo sapiens
tcagctttaaggtaactgctgggttctaaaaaacattact

SEQ ID NO: 92570 - DNA, 40 bp, Homo sapiens
gtaatgttttttagaacccagcagttaccttaaagctgaa

SEQ ID NO: 92571 - DNA, 40 bp, Homo sapiens
ttcagctttaaggtaactgctgggttctaaaaaacattac

SEQ ID NO: 92572 - DNA, 40 bp, Homo sapiens
taatgttttttagaacccagcagttaccttaaagctgaat

SEQ ID NO: 92573 - DNA, 40 bp, Homo sapiens
attcagctttaaggtaactgctgggttctaaaaaacatta

SEQ ID NO: 92574 - DNA, 40 bp, Homo sapiens
aatgttttttagaacccagcagttaccttaaagctgaatt

SEQ ID NO: 92575 - DNA, 40 bp, Homo sapiens
aattcagctttaaggtaactgctgggttctaaaaaacatt

SEQ ID NO: 92576 - DNA, 40 bp, Homo sapiens
atgttttttagaacccagcagttaccttaaagctgaattt

SEQ ID NO: 92577 - DNA, 40 bp, Homo sapiens
aaattcagctttaaggtaactgctgggttctaaaaaacat

SEQ ID NO: 92578 - DNA, 40 bp, Homo sapiens
tgttttttagaacccagcagttaccttaaagctgaattta

SEQ ID NO: 92579 - DNA, 40 bp, Homo sapiens
taaattcagctttaaggtaactgctgggttctaaaaaaca

SEQ ID NO: 92580 - DNA, 40 bp, Homo sapiens
gttttttagaacccagcagttaccttaaagctgaatttat

SEQ ID NO: 92581 - DNA, 40 bp, Homo sapiens
ataaattcagctttaaggtaactgctgggttctaaaaaac

SEQ ID NO: 92582 - DNA, 40 bp, Homo sapiens
ttttttagaacccagcagttaccttaaagctgaatttata

SEQ ID NO: 92583 - DNA, 40 bp, Homo sapiens
tataaattcagctttaaggtaactgctgggttctaaaaaa

SEQ ID NO: 92584 - DNA, 40 bp, Homo sapiens
tttttagaacccagcagttaccttaaagctgaatttatat

SEQ ID NO: 92585 - DNA, 40 bp, Homo sapiens
atataaattcagctttaaggtaactgctgggttctaaaaa

SEQ ID NO: 92586 - DNA, 40 bp, Homo sapiens
ttttagaacccagcagttaccttaaagctgaatttatatt

SEQ ID NO: 92587 - DNA, 40 bp, Homo sapiens
aatataaattcagctttaaggtaactgctgggttctaaaa

SEQ ID NO: 92588 - DNA, 40 bp, Homo sapiens
tttagaacccagcagttaccttaaagctgaatttatattt

SEQ ID NO: 92589 - DNA, 40 bp, Homo sapiens
aaatataaattcagctttaaggtaactgctgggttctaaa

SEQ ID NO: 92590 - DNA, 40 bp, Homo sapiens
ttagaacccagcagttaccttaaagctgaatttatattta

SEQ ID NO: 92591 - DNA, 40 bp, Homo sapiens
taaatataaattcagctttaaggtaactgctgggttctaa

SEQ ID NO: 92592 - DNA, 40 bp, Homo sapiens
tagaacccagcagttaccttaaagctgaatttatatttag

SEQ ID NO: 92593 - DNA, 40 bp, Homo sapiens
ctaaatataaattcagctttaaggtaactgctgggttcta

SEQ ID NO: 92594 - DNA, 40 bp, Homo sapiens
agaacccagcagttaccttaaagctgaatttatatttagt

SEQ ID NO: 92595 - DNA, 40 bp, Homo sapiens
actaaatataaattcagctttaaggtaactgctgggttct

SEQ ID NO: 92596 - DNA, 40 bp, Homo sapiens
gaacccagcagttaccttaaagctgaatttatatttagta

SEQ ID NO: 92597 - DNA, 40 bp, Homo sapiens
tactaaatataaattcagctttaaggtaactgctgggttc

SEQ ID NO: 92598 - DNA, 40 bp, Homo sapiens
aacccagcagttaccttaaagctgaatttatatttagtaa

SEQ ID NO: 92599 - DNA, 40 bp, Homo sapiens
ttactaaatataaattcagctttaaggtaactgctgggtt

SEQ ID NO: 92600 - DNA, 40 bp, Homo sapiens
acccagcagttaccttaaagctgaatttatatttagtaac

SEQ ID NO: 92601 - DNA, 40 bp, Homo sapiens
gttactaaatataaattcagctttaaggtaactgctgggt

SEQ ID NO: 92602 - DNA, 40 bp, Homo sapiens
cccagcagttaccttaaagctgaatttatatttagtaact

SEQ ID NO: 92603 - DNA, 40 bp, Homo sapiens
agttactaaatataaattcagctttaaggtaactgctggg

SEQ ID NO: 92604 - DNA, 40 bp, Homo sapiens
ccagcagttaccttaaagctgaatttatatttagtaactt

SEQ ID NO: 92605 - DNA, 40 bp, Homo sapiens
aagttactaaatataaattcagctttaaggtaactgctgg

SEQ ID NO: 92606 - DNA, 40 bp, Homo sapiens
cagcagttaccttaaagctgaatttatatttagtaacttc

SEQ ID NO: 92607 - DNA, 40 bp, Homo sapiens
gaagttactaaatataaattcagctttaaggtaactgctg

SEQ ID NO: 92608 - DNA, 40 bp, Homo sapiens
agcagttaccttaaagctgaatttatatttagtaacttct

SEQ ID NO: 92609 - DNA, 40 bp, Homo sapiens
agaagttactaaatataaattcagctttaaggtaactgct

SEQ ID NO: 92610 - DNA, 40 bp, Homo sapiens
gcagttaccttaaagctgaatttatatttagtaacttctg

SEQ ID NO: 92611 - DNA, 40 bp, Homo sapiens
cagaagttactaaatataaattcagctttaaggtaactgc

SEQ ID NO: 92612 - DNA, 40 bp, Homo sapiens
cagttaccttaaagctgaatttatatttagtaacttctgt

SEQ ID NO: 92613 - DNA, 40 bp, Homo sapiens
acagaagttactaaatataaattcagctttaaggtaactg

SEQ ID NO: 92614 - DNA, 40 bp, Homo sapiens
agttaccttaaagctgaatttatatttagtaacttctgtg

SEQ ID NO: 92615 - DNA, 40 bp, Homo sapiens
cacagaagttactaaatataaattcagctttaaggtaact

SEQ ID NO: 92616 - DNA, 40 bp, Homo sapiens
gttaccttaaagctgaatttatatttagtaacttctgtgt

SEQ ID NO: 92617 - DNA, 40 bp, Homo sapiens
acacagaagttactaaatataaattcagctttaaggtaac

SEQ ID NO: 92618 - DNA, 40 bp, Homo sapiens
ttaccttaaagctgaatttatatttagtaacttctgtgtt

SEQ ID NO: 92619 - DNA, 40 bp, Homo sapiens
aacacagaagttactaaatataaattcagctttaaggtaa

SEQ ID NO: 92620 - DNA, 40 bp, Homo sapiens
taccttaaagctgaatttatatttagtaacttctgtgtta

SEQ ID NO: 92621 - DNA, 40 bp, Homo sapiens
taacacagaagttactaaatataaattcagctttaaggta

SEQ ID NO: 92622 - DNA, 40 bp, Homo sapiens
accttaaagctgaatttatatttagtaacttctgtgttaa

SEQ ID NO: 92623 - DNA, 40 bp, Homo sapiens
ttaacacagaagttactaaatataaattcagctttaaggt

SEQ ID NO: 92624 - DNA, 40 bp, Homo sapiens
ccttaaagctgaatttatatttagtaacttctgtgttaat

SEQ ID NO: 92625 - DNA, 40 bp, Homo sapiens
attaacacagaagttactaaatataaattcagctttaagg

SEQ ID NO: 92626 - DNA, 40 bp, Homo sapiens
cttaaagctgaatttatatttagtaacttctgtgttaata

SEQ ID NO: 92627 - DNA, 40 bp, Homo sapiens
tattaacacagaagttactaaatataaattcagctttaag

SEQ ID NO: 92628 - DNA, 40 bp, Homo sapiens
ttaaagctgaatttatatttagtaacttctgtgttaatac

SEQ ID NO: 92629 - DNA, 40 bp, Homo sapiens
gtattaacacagaagttactaaatataaattcagctttaa

SEQ ID NO: 92630 - DNA, 40 bp, Homo sapiens
taaagctgaatttatatttagtaacttctgtgttaatact

SEQ ID NO: 92631 - DNA, 40 bp, Homo sapiens
agtattaacacagaagttactaaatataaattcagcttta

SEQ ID NO: 92632 - DNA, 40 bp, Homo sapiens
aaagctgaatttatatttagtaacttctgtgttaatactg

SEQ ID NO: 92633 - DNA, 40 bp, Homo sapiens
cagtattaacacagaagttactaaatataaattcagcttt

SEQ ID NO: 92634 - DNA, 40 bp, Homo sapiens
aagctgaatttatatttagtaacttctgtgttaatactgg

SEQ ID NO: 92635 - DNA, 40 bp, Homo sapiens
ccagtattaacacagaagttactaaatataaattcagctt

SEQ ID NO: 92636 - DNA, 40 bp, Homo sapiens
agctgaatttatatttagtaacttctgtgttaatactgga

SEQ ID NO: 92637 - DNA, 40 bp, Homo sapiens
tccagtattaacacagaagttactaaatataaattcagct

SEQ ID NO: 92638 - DNA, 40 bp, Homo sapiens
gctgaatttatatttagtaacttctgtgttaatactggat

SEQ ID NO: 92639 - DNA, 40 bp, Homo sapiens
atccagtattaacacagaagttactaaatataaattcagc

SEQ ID NO: 92640 - DNA, 40 bp, Homo sapiens
ctgaatttatatttagtaacttctgtgttaatactggata

SEQ ID NO: 92641 - DNA, 40 bp, Homo sapiens
tatccagtattaacacagaagttactaaatataaattcag

SEQ ID NO: 92642 - DNA, 40 bp, Homo sapiens
tgaatttatatttagtaacttctgtgttaatactggatag

SEQ ID NO: 92643 - DNA, 40 bp, Homo sapiens
ctatccagtattaacacagaagttactaaatataaattca

SEQ ID NO: 92644 - DNA, 40 bp, Homo sapiens
gaatttatatttagtaacttctgtgttaatactggatagc

SEQ ID NO: 92645 - DNA, 40 bp, Homo sapiens
gctatccagtattaacacagaagttactaaatataaattc

SEQ ID NO: 92646 - DNA, 40 bp, Homo sapiens
aatttatatttagtaacttctgtgttaatactggatagca

SEQ ID NO: 92647 - DNA, 40 bp, Homo sapiens
tgctatccagtattaacacagaagttactaaatataaatt

SEQ ID NO: 92648 - DNA, 40 bp, Homo sapiens
atttatatttagtaacttctgtgttaatactggatagcat

SEQ ID NO: 92649 - DNA, 40 bp, Homo sapiens
atgctatccagtattaacacagaagttactaaatataaat

SEQ ID NO: 92650 - DNA, 40 bp, Homo sapiens
tttatatttagtaacttctgtgttaatactggatagcatg

SEQ ID NO: 92651 - DNA, 40 bp, Homo sapiens
catgctatccagtattaacacagaagttactaaatataaa

SEQ ID NO: 92652 - DNA, 40 bp, Homo sapiens
ttatatttagtaacttctgtgttaatactggatagcatga

SEQ ID NO: 92653 - DNA, 40 bp, Homo sapiens
tcatgctatccagtattaacacagaagttactaaatataa

SEQ ID NO: 92654 - DNA, 40 bp, Homo sapiens
tatatttagtaacttctgtgttaatactggatagcatgaa

SEQ ID NO: 92655 - DNA, 40 bp, Homo sapiens
ttcatgctatccagtattaacacagaagttactaaatata

SEQ ID NO: 92656 - DNA, 40 bp, Homo sapiens
atatttagtaacttctgtgttaatactggatagcatgaat

SEQ ID NO: 92657 - DNA, 40 bp, Homo sapiens
attcatgctatccagtattaacacagaagttactaaatat

SEQ ID NO: 92658 - DNA, 40 bp, Homo sapiens
tatttagtaacttctgtgttaatactggatagcatgaatt

SEQ ID NO: 92659 - DNA, 40 bp, Homo sapiens
aattcatgctatccagtattaacacagaagttactaaata

SEQ ID NO: 92660 - DNA, 40 bp, Homo sapiens
atttagtaacttctgtgttaatactggatagcatgaattc

SEQ ID NO: 92661 - DNA, 40 bp, Homo sapiens
gaattcatgctatccagtattaacacagaagttactaaat

SEQ ID NO: 92662 - DNA, 40 bp, Homo sapiens
tttagtaacttctgtgttaatactggatagcatgaattct

SEQ ID NO: 92663 - DNA, 40 bp, Homo sapiens
agaattcatgctatccagtattaacacagaagttactaaa

SEQ ID NO: 92664 - DNA, 40 bp, Homo sapiens
ttagtaacttctgtgttaatactggatagcatgaattctg

SEQ ID NO: 92665 - DNA, 40 bp, Homo sapiens
cagaattcatgctatccagtattaacacagaagttactaa

SEQ ID NO: 92666 - DNA, 40 bp, Homo sapiens
tagtaacttctgtgttaatactggatagcatgaattctgc

SEQ ID NO: 92667 - DNA, 40 bp, Homo sapiens
gcagaattcatgctatccagtattaacacagaagttacta

SEQ ID NO: 92668 - DNA, 40 bp, Homo sapiens
agtaacttctgtgttaatactggatagcatgaattctgca

SEQ ID NO: 92669 - DNA, 40 bp, Homo sapiens
tgcagaattcatgctatccagtattaacacagaagttact

SEQ ID NO: 92670 - DNA, 40 bp, Homo sapiens
gtaacttctgtgttaatactggatagcatgaattctgcat

SEQ ID NO: 92671 - DNA, 40 bp, Homo sapiens
atgcagaattcatgctatccagtattaacacagaagttac

SEQ ID NO: 92672 - DNA, 40 bp, Homo sapiens
taacttctgtgttaatactggatagcatgaattctgcatt

SEQ ID NO: 92673 - DNA, 40 bp, Homo sapiens
aatgcagaattcatgctatccagtattaacacagaagtta

SEQ ID NO: 92674 - DNA, 40 bp, Homo sapiens
aacttctgtgttaatactggatagcatgaattctgcattg

SEQ ID NO: 92675 - DNA, 40 bp, Homo sapiens
caatgcagaattcatgctatccagtattaacacagaagtt

SEQ ID NO: 92676 - DNA, 40 bp, Homo sapiens
acttctgtgttaatactggatagcatgaattctgcattga

SEQ ID NO: 92677 - DNA, 40 bp, Homo sapiens
tcaatgcagaattcatgctatccagtattaacacagaagt

SEQ ID NO: 92678 - DNA, 40 bp, Homo sapiens
cttctgtgttaatactggatagcatgaattctgcattgag

SEQ ID NO: 92679 - DNA, 40 bp, Homo sapiens
ctcaatgcagaattcatgctatccagtattaacacagaag

SEQ ID NO: 92680 - DNA, 40 bp, Homo sapiens
ttctgtgttaatactggatagcatgaattctgcattgaga

SEQ ID NO: 92681 - DNA, 40 bp, Homo sapiens
tctcaatgcagaattcatgctatccagtattaacacagaa

SEQ ID NO: 92682 - DNA, 40 bp, Homo sapiens
tctgtgttaatactggatagcatgaattctgcattgagaa

SEQ ID NO: 92683 - DNA, 40 bp, Homo sapiens
ttctcaatgcagaattcatgctatccagtattaacacaga

SEQ ID NO: 92684 - DNA, 40 bp, Homo sapiens
ctgtgttaatactggatagcatgaattctgcattgagaaa

SEQ ID NO: 92685 - DNA, 40 bp, Homo sapiens
tttctcaatgcagaattcatgctatccagtattaacacag

SEQ ID NO: 92686 - DNA, 40 bp, Homo sapiens
tgtgttaatactggatagcatgaattctgcattgagaaac

SEQ ID NO: 92687 - DNA, 40 bp, Homo sapiens
gtttctcaatgcagaattcatgctatccagtattaacaca

SEQ ID NO: 92688 - DNA, 40 bp, Homo sapiens
gtgttaatactggatagcatgaattctgcattgagaaact

SEQ ID NO: 92689 - DNA, 40 bp, Homo sapiens
agtttctcaatgcagaattcatgctatccagtattaacac

SEQ ID NO: 92690 - DNA, 40 bp, Homo sapiens
tgttaatactggatagcatgaattctgcattgagaaactg

SEQ ID NO: 92691 - DNA, 40 bp, Homo sapiens
cagtttctcaatgcagaattcatgctatccagtattaaca

SEQ ID NO: 92692 - DNA, 40 bp, Homo sapiens
gttaatactggatagcatgaattctgcattgagaaactga

SEQ ID NO: 92693 - DNA, 40 bp, Homo sapiens
tcagtttctcaatgcagaattcatgctatccagtattaac

SEQ ID NO: 92694 - DNA, 40 bp, Homo sapiens
ttaatactggatagcatgaattctgcattgagaaactgaa

SEQ ID NO: 92695 - DNA, 40 bp, Homo sapiens
ttcagtttctcaatgcagaattcatgctatccagtattaa

SEQ ID NO: 92696 - DNA, 40 bp, Homo sapiens
taatactggatagcatgaattctgcattgagaaactgaat

SEQ ID NO: 92697 - DNA, 40 bp, Homo sapiens
attcagtttctcaatgcagaattcatgctatccagtatta

SEQ ID NO: 92698 - DNA, 40 bp, Homo sapiens
aatactggatagcatgaattctgcattgagaaactgaata

SEQ ID NO: 92699 - DNA, 40 bp, Homo sapiens
tattcagtttctcaatgcagaattcatgctatccagtatt

SEQ ID NO: 92700 - DNA, 40 bp, Homo sapiens
atactggatagcatgaattctgcattgagaaactgaatag

SEQ ID NO: 92701 - DNA, 40 bp, Homo sapiens
ctattcagtttctcaatgcagaattcatgctatccagtat

SEQ ID NO: 92702 - DNA, 40 bp, Homo sapiens
tactggatagcatgaattctgcattgagaaactgaatagc

SEQ ID NO: 92703 - DNA, 40 bp, Homo sapiens
gctattcagtttctcaatgcagaattcatgctatccagta

SEQ ID NO: 92704 - DNA, 40 bp, Homo sapiens
actggatagcatgaattctgcattgagaaactgaatagct

SEQ ID NO: 92705 - DNA, 40 bp, Homo sapiens
agctattcagtttctcaatgcagaattcatgctatccagt

SEQ ID NO: 92706 - DNA, 40 bp, Homo sapiens
ctggatagcatgaattctgcattgagaaactgaatagctg

SEQ ID NO: 92707 - DNA, 40 bp, Homo sapiens
cagctattcagtttctcaatgcagaattcatgctatccag

SEQ ID NO: 92708 - DNA, 40 bp, Homo sapiens
tggatagcatgaattctgcattgagaaactgaatagctgt

SEQ ID NO: 92709 - DNA, 40 bp, Homo sapiens
acagctattcagtttctcaatgcagaattcatgctatcca

SEQ ID NO: 92710 - DNA, 40 bp, Homo sapiens
ggatagcatgaattctgcattgagaaactgaatagctgtc

SEQ ID NO: 92711 - DNA, 40 bp, Homo sapiens
gacagctattcagtttctcaatgcagaattcatgctatcc

SEQ ID NO: 92712 - DNA, 40 bp, Homo sapiens
gatagcatgaattctgcattgagaaactgaatagctgtca

SEQ ID NO: 92713 - DNA, 40 bp, Homo sapiens
tgacagctattcagtttctcaatgcagaattcatgctatc

SEQ ID NO: 92714 - DNA, 40 bp, Homo sapiens
atagcatgaattctgcattgagaaactgaatagctgtcat

SEQ ID NO: 92715 - DNA, 40 bp, Homo sapiens
atgacagctattcagtttctcaatgcagaattcatgctat

SEQ ID NO: 92716 - DNA, 40 bp, Homo sapiens
tagcatgaattctgcattgagaaactgaatagctgtcata

SEQ ID NO: 92717 - DNA, 40 bp, Homo sapiens
tatgacagctattcagtttctcaatgcagaattcatgcta

SEQ ID NO: 92718 - DNA, 40 bp, Homo sapiens
agcatgaattctgcattgagaaactgaatagctgtcataa

SEQ ID NO: 92719 - DNA, 40 bp, Homo sapiens
ttatgacagctattcagtttctcaatgcagaattcatgct

SEQ ID NO: 92720 - DNA, 40 bp, Homo sapiens
gcatgaattctgcattgagaaactgaatagctgtcataaa

SEQ ID NO: 92721 - DNA, 40 bp, Homo sapiens
tttatgacagctattcagtttctcaatgcagaattcatgc

SEQ ID NO: 92722 - DNA, 40 bp, Homo sapiens
catgaattctgcattgagaaactgaatagctgtcataaaa

SEQ ID NO: 92723 - DNA, 40 bp, Homo sapiens
ttttatgacagctattcagtttctcaatgcagaattcatg

SEQ ID NO: 92724 - DNA, 40 bp, Homo sapiens
atgaattctgcattgagaaactgaatagctgtcataaaat

SEQ ID NO: 92725 - DNA, 40 bp, Homo sapiens
attttatgacagctattcagtttctcaatgcagaattcat

SEQ ID NO: 92726 - DNA, 40 bp, Homo sapiens
tgaattctgcattgagaaactgaatagctgtcataaaatg

SEQ ID NO: 92727 - DNA, 40 bp, Homo sapiens
cattttatgacagctattcagtttctcaatgcagaattca

SEQ ID NO: 92728 - DNA, 40 bp, Homo sapiens
gaattctgcattgagaaactgaatagctgtcataaaatga

SEQ ID NO: 92729 - DNA, 40 bp, Homo sapiens
tcattttatgacagctattcagtttctcaatgcagaattc

SEQ ID NO: 92730 - DNA, 40 bp, Homo sapiens
aattctgcattgagaaactgaatagctgtcataaaatgaa

SEQ ID NO: 92731 - DNA, 40 bp, Homo sapiens
ttcattttatgacagctattcagtttctcaatgcagaatt

SEQ ID NO: 92732 - DNA, 40 bp, Homo sapiens
attctgcattgagaaactgaatagctgtcataaaatgaaa

SEQ ID NO: 92733 - DNA, 40 bp, Homo sapiens
tttcattttatgacagctattcagtttctcaatgcagaat

SEQ ID NO: 92734 - DNA, 40 bp, Homo sapiens
ttctgcattgagaaactgaatagctgtcataaaatgaaac

SEQ ID NO: 92735 - DNA, 40 bp, Homo sapiens
gtttcattttatgacagctattcagtttctcaatgcagaa

SEQ ID NO: 92736 - DNA, 40 bp, Homo sapiens
tctgcattgagaaactgaatagctgtcataaaatgaaact

SEQ ID NO: 92737 - DNA, 40 bp, Homo sapiens
agtttcattttatgacagctattcagtttctcaatgcaga

SEQ ID NO: 92738 - DNA, 40 bp, Homo sapiens
ctgcattgagaaactgaatagctgtcataaaatgaaactt

SEQ ID NO: 92739 - DNA, 40 bp, Homo sapiens
aagtttcattttatgacagctattcagtttctcaatgcag

SEQ ID NO: 92740 - DNA, 40 bp, Homo sapiens
tgcattgagaaactgaatagctgtcataaaatgaaacttt

SEQ ID NO: 92741 - DNA, 40 bp, Homo sapiens
aaagtttcattttatgacagctattcagtttctcaatgca

SEQ ID NO: 92742 - DNA, 40 bp, Homo sapiens
gcattgagaaactgaatagctgtcataaaatgaaactttc

SEQ ID NO: 92743 - DNA, 40 bp, Homo sapiens
gaaagtttcattttatgacagctattcagtttctcaatgc

SEQ ID NO: 92744 - DNA, 40 bp, Homo sapiens
cattgagaaactgaatagctgtcataaaatgaaactttct

SEQ ID NO: 92745 - DNA, 40 bp, Homo sapiens
agaaagtttcattttatgacagctattcagtttctcaatg

SEQ ID NO: 92746 - DNA, 40 bp, Homo sapiens
attgagaaactgaatagctgtcataaaatgaaactttctt

SEQ ID NO: 92747 - DNA, 40 bp, Homo sapiens
aagaaagtttcattttatgacagctattcagtttctcaat

SEQ ID NO: 92748 - DNA, 40 bp, Homo sapiens
ttgagaaactgaatagctgtcataaaatgaaactttcttt

SEQ ID NO: 92749 - DNA, 40 bp, Homo sapiens
aaagaaagtttcattttatgacagctattcagtttctcaa

SEQ ID NO: 92750 - DNA, 40 bp, Homo sapiens
tgagaaactgaatagctgtcataaaatgaaactttctttc

SEQ ID NO: 92751 - DNA, 40 bp, Homo sapiens
gaaagaaagtttcattttatgacagctattcagtttctca

SEQ ID NO: 92752 - DNA, 40 bp, Homo sapiens
gagaaactgaatagctgtcataaaatgaaactttctttct

SEQ ID NO: 92753 - DNA, 40 bp, Homo sapiens
agaaagaaagtttcattttatgacagctattcagtttctc

SEQ ID NO: 92754 - DNA, 40 bp, Homo sapiens
agaaactgaatagctgtcataaaatgaaactttctttcta

SEQ ID NO: 92755 - DNA, 40 bp, Homo sapiens
tagaaagaaagtttcattttatgacagctattcagtttct

SEQ ID NO: 92756 - DNA, 40 bp, Homo sapiens
gaaactgaatagctgtcataaaatgaaactttctttctaa

SEQ ID NO: 92757 - DNA, 40 bp, Homo sapiens
ttagaaagaaagtttcattttatgacagctattcagtttc

SEQ ID NO: 92758 - DNA, 40 bp, Homo sapiens
aaactgaatagctgtcataaaatgaaactttctttctaaa

SEQ ID NO: 92759 - DNA, 40 bp, Homo sapiens
tttagaaagaaagtttcattttatgacagctattcagttt

SEQ ID NO: 92760 - DNA, 40 bp, Homo sapiens
aactgaatagctgtcataaaatgaaactttctttctaaag

SEQ ID NO: 92761 - DNA, 40 bp, Homo sapiens
ctttagaaagaaagtttcattttatgacagctattcagtt

SEQ ID NO: 92762 - DNA, 40 bp, Homo sapiens
actgaatagctgtcataaaatgaaactttctttctaaaga

SEQ ID NO: 92763 - DNA, 40 bp, Homo sapiens
tctttagaaagaaagtttcattttatgacagctattcagt

SEQ ID NO: 92764 - DNA, 40 bp, Homo sapiens
ctgaatagctgtcataaaatgaaactttctttctaaagaa

SEQ ID NO: 92765 - DNA, 40 bp, Homo sapiens
ttctttagaaagaaagtttcattttatgacagctattcag

SEQ ID NO: 92766 - DNA, 40 bp, Homo sapiens
tgaatagctgtcataaaatgaaactttctttctaaagaaa

SEQ ID NO: 92767 - DNA, 40 bp, Homo sapiens
tttctttagaaagaaagtttcattttatgacagctattca

SEQ ID NO: 92768 - DNA, 40 bp, Homo sapiens
gaatagctgtcataaaatgaaactttctttctaaagaaag

SEQ ID NO: 92769 - DNA, 40 bp, Homo sapiens
ctttctttagaaagaaagtttcattttatgacagctattc

SEQ ID NO: 92770 - DNA, 40 bp, Homo sapiens
aatagctgtcataaaatgaaactttctttctaaagaaaga

SEQ ID NO: 92771 - DNA, 40 bp, Homo sapiens
tctttctttagaaagaaagtttcattttatgacagctatt

SEQ ID NO: 92772 - DNA, 40 bp, Homo sapiens
atagctgtcataaaatgaaactttctttctaaagaaagat

SEQ ID NO: 92773 - DNA, 40 bp, Homo sapiens
atctttctttagaaagaaagtttcattttatgacagctat

SEQ ID NO: 92774 - DNA, 40 bp, Homo sapiens
tagctgtcataaaatgaaactttctttctaaagaaagata

SEQ ID NO: 92775 - DNA, 40 bp, Homo sapiens
tatctttctttagaaagaaagtttcattttatgacagcta

SEQ ID NO: 92776 - DNA, 40 bp, Homo sapiens
agctgtcataaaatgaaactttctttctaaagaaagatac

SEQ ID NO: 92777 - DNA, 40 bp, Homo sapiens
gtatctttctttagaaagaaagtttcattttatgacagct

SEQ ID NO: 92778 - DNA, 40 bp, Homo sapiens
gctgtcataaaatgaaactttctttctaaagaaagatact

SEQ ID NO: 92779 - DNA, 40 bp, Homo sapiens
agtatctttctttagaaagaaagtttcattttatgacagc

SEQ ID NO: 92780 - DNA, 40 bp, Homo sapiens
ctgtcataaaatgaaactttctttctaaagaaagatactc

SEQ ID NO: 92781 - DNA, 40 bp, Homo sapiens
gagtatctttctttagaaagaaagtttcattttatgacag

SEQ ID NO: 92782 - DNA, 40 bp, Homo sapiens
tgtcataaaatgaaactttctttctaaagaaagatactca

SEQ ID NO: 92783 - DNA, 40 bp, Homo sapiens
tgagtatctttctttagaaagaaagtttcattttatgaca

SEQ ID NO: 92784 - DNA, 40 bp, Homo sapiens
gtcataaaatgaaactttctttctaaagaaagatactcac

SEQ ID NO: 92785 - DNA, 40 bp, Homo sapiens
gtgagtatctttctttagaaagaaagtttcattttatgac

SEQ ID NO: 92786 - DNA, 40 bp, Homo sapiens
tcataaaatgaaactttctttctaaagaaagatactcaca

SEQ ID NO: 92787 - DNA, 40 bp, Homo sapiens
tgtgagtatctttctttagaaagaaagtttcattttatga

SEQ ID NO: 92788 - DNA, 40 bp, Homo sapiens
cataaaatgaaactttctttctaaagaaagatactcacat

SEQ ID NO: 92789 - DNA, 40 bp, Homo sapiens
atgtgagtatctttctttagaaagaaagtttcattttatg

SEQ ID NO: 92790 - DNA, 40 bp, Homo sapiens
ataaaatgaaactttctttctaaagaaagatactcacatg

SEQ ID NO: 92791 - DNA, 40 bp, Homo sapiens
catgtgagtatctttctttagaaagaaagtttcattttat

SEQ ID NO: 92792 - DNA, 40 bp, Homo sapiens
taaaatgaaactttctttctaaagaaagatactcacatga

SEQ ID NO: 92793 - DNA, 40 bp, Homo sapiens
tcatgtgagtatctttctttagaaagaaagtttcatttta

SEQ ID NO: 92794 - DNA, 40 bp, Homo sapiens
aaaatgaaactttctttctaaagaaagatactcacatgag

SEQ ID NO: 92795 - DNA, 40 bp, Homo sapiens
ctcatgtgagtatctttctttagaaagaaagtttcatttt

SEQ ID NO: 92796 - DNA, 40 bp, Homo sapiens
aaatgaaactttctttctaaagaaagatactcacatgagt

SEQ ID NO: 92797 - DNA, 40 bp, Homo sapiens
actcatgtgagtatctttctttagaaagaaagtttcattt

SEQ ID NO: 92798 - DNA, 40 bp, Homo sapiens
aatgaaactttctttctaaagaaagatactcacatgagtt

SEQ ID NO: 92799 - DNA, 40 bp, Homo sapiens
aactcatgtgagtatctttctttagaaagaaagtttcatt

SEQ ID NO: 92800 - DNA, 40 bp, Homo sapiens
atgaaactttctttctaaagaaagatactcacatgagttc

SEQ ID NO: 92801 - DNA, 40 bp, Homo sapiens
gaactcatgtgagtatctttctttagaaagaaagtttcat

SEQ ID NO: 92802 - DNA, 40 bp, Homo sapiens
tgaaactttctttctaaagaaagatactcacatgagttct

SEQ ID NO: 92803 - DNA, 40 bp, Homo sapiens
agaactcatgtgagtatctttctttagaaagaaagtttca

SEQ ID NO: 92804 - DNA, 40 bp, Homo sapiens
gaaactttctttctaaagaaagatactcacatgagttctt

SEQ ID NO: 92805 - DNA, 40 bp, Homo sapiens
aagaactcatgtgagtatctttctttagaaagaaagtttc

SEQ ID NO: 92806 - DNA, 40 bp, Homo sapiens
aaactttctttctaaagaaagatactcacatgagttcttg

SEQ ID NO: 92807 - DNA, 40 bp, Homo sapiens
caagaactcatgtgagtatctttctttagaaagaaagttt

SEQ ID NO: 92808 - DNA, 40 bp, Homo sapiens
aactttctttctaaagaaagatactcacatgagttcttga

SEQ ID NO: 92809 - DNA, 40 bp, Homo sapiens
tcaagaactcatgtgagtatctttctttagaaagaaagtt

SEQ ID NO: 92810 - DNA, 40 bp, Homo sapiens
actttctttctaaagaaagatactcacatgagttcttgaa

SEQ ID NO: 92811 - DNA, 40 bp, Homo sapiens
ttcaagaactcatgtgagtatctttctttagaaagaaagt

SEQ ID NO: 92812 - DNA, 40 bp, Homo sapiens
ctttctttctaaagaaagatactcacatgagttcttgaag

SEQ ID NO: 92813 - DNA, 40 bp, Homo sapiens
cttcaagaactcatgtgagtatctttctttagaaagaaag

SEQ ID NO: 92814 - DNA, 40 bp, Homo sapiens
tttctttctaaagaaagatactcacatgagttcttgaaga

SEQ ID NO: 92815 - DNA, 40 bp, Homo sapiens
tcttcaagaactcatgtgagtatctttctttagaaagaaa

SEQ ID NO: 92816 - DNA, 40 bp, Homo sapiens
ttctttctaaagaaagatactcacatgagttcttgaagaa

SEQ ID NO: 92817 - DNA, 40 bp, Homo sapiens
ttcttcaagaactcatgtgagtatctttctttagaaagaa

SEQ ID NO: 92818 - DNA, 40 bp, Homo sapiens
tctttctaaagaaagatactcacatgagttcttgaagaat

SEQ ID NO: 92819 - DNA, 40 bp, Homo sapiens
attcttcaagaactcatgtgagtatctttctttagaaaga

SEQ ID NO: 92820 - DNA, 40 bp, Homo sapiens
ctttctaaagaaagatactcacatgagttcttgaagaata

SEQ ID NO: 92821 - DNA, 40 bp, Homo sapiens
tattcttcaagaactcatgtgagtatctttctttagaaag

SEQ ID NO: 92822 - DNA, 40 bp, Homo sapiens
tttctaaagaaagatactcacatgagttcttgaagaatag

SEQ ID NO: 92823 - DNA, 40 bp, Homo sapiens
ctattcttcaagaactcatgtgagtatctttctttagaaa

SEQ ID NO: 92824 - DNA, 40 bp, Homo sapiens
ttctaaagaaagatactcacatgagttcttgaagaatagt

SEQ ID NO: 92825 - DNA, 40 bp, Homo sapiens
actattcttcaagaactcatgtgagtatctttctttagaa

SEQ ID NO: 92826 - DNA, 40 bp, Homo sapiens
tctaaagaaagatactcacatgagttcttgaagaatagtc

SEQ ID NO: 92827 - DNA, 40 bp, Homo sapiens
gactattcttcaagaactcatgtgagtatctttctttaga

SEQ ID NO: 92828 - DNA, 40 bp, Homo sapiens
ctaaagaaagatactcacatgagttcttgaagaatagtca

SEQ ID NO: 92829 - DNA, 40 bp, Homo sapiens
tgactattcttcaagaactcatgtgagtatctttctttag

SEQ ID NO: 92830 - DNA, 40 bp, Homo sapiens
taaagaaagatactcacatgagttcttgaagaatagtcat

SEQ ID NO: 92831 - DNA, 40 bp, Homo sapiens
atgactattcttcaagaactcatgtgagtatctttcttta

SEQ ID NO: 92832 - DNA, 40 bp, Homo sapiens
aaagaaagatactcacatgagttcttgaagaatagtcata

SEQ ID NO: 92833 - DNA, 40 bp, Homo sapiens
tatgactattcttcaagaactcatgtgagtatctttcttt

SEQ ID NO: 92834 - DNA, 40 bp, Homo sapiens
aagaaagatactcacatgagttcttgaagaatagtcataa

SEQ ID NO: 92835 - DNA, 40 bp, Homo sapiens
ttatgactattcttcaagaactcatgtgagtatctttctt

SEQ ID NO: 92836 - DNA, 40 bp, Homo sapiens
agaaagatactcacatgagttcttgaagaatagtcataac

SEQ ID NO: 92837 - DNA, 40 bp, Homo sapiens
gttatgactattcttcaagaactcatgtgagtatctttct

SEQ ID NO: 92838 - DNA, 40 bp, Homo sapiens
gaaagatactcacatgagttcttgaagaatagtcataact

SEQ ID NO: 92839 - DNA, 40 bp, Homo sapiens
agttatgactattcttcaagaactcatgtgagtatctttc

SEQ ID NO: 92840 - DNA, 40 bp, Homo sapiens
aaagatactcacatgagttcttgaagaatagtcataacta

SEQ ID NO: 92841 - DNA, 40 bp, Homo sapiens
tagttatgactattcttcaagaactcatgtgagtatcttt

SEQ ID NO: 92842 - DNA, 40 bp, Homo sapiens
aagatactcacatgagttcttgaagaatagtcataactag

SEQ ID NO: 92843 - DNA, 40 bp, Homo sapiens
ctagttatgactattcttcaagaactcatgtgagtatctt

SEQ ID NO: 92844 - DNA, 40 bp, Homo sapiens
agatactcacatgagttcttgaagaatagtcataactaga

SEQ ID NO: 92845 - DNA, 40 bp, Homo sapiens
tctagttatgactattcttcaagaactcatgtgagtatct

SEQ ID NO: 92846 - DNA, 40 bp, Homo sapiens
gatactcacatgagttcttgaagaatagtcataactagat

SEQ ID NO: 92847 - DNA, 40 bp, Homo sapiens
atctagttatgactattcttcaagaactcatgtgagtatc

SEQ ID NO: 92848 - DNA, 40 bp, Homo sapiens
atactcacatgagttcttgaagaatagtcataactagatt

SEQ ID NO: 92849 - DNA, 40 bp, Homo sapiens
aatctagttatgactattcttcaagaactcatgtgagtat

SEQ ID NO: 92850 - DNA, 40 bp, Homo sapiens
tactcacatgagttcttgaagaatagtcataactagatta

SEQ ID NO: 92851 - DNA, 40 bp, Homo sapiens
taatctagttatgactattcttcaagaactcatgtgagta

SEQ ID NO: 92852 - DNA, 40 bp, Homo sapiens
actcacatgagttcttgaagaatagtcataactagattaa

SEQ ID NO: 92853 - DNA, 40 bp, Homo sapiens
ttaatctagttatgactattcttcaagaactcatgtgagt

SEQ ID NO: 92854 - DNA, 40 bp, Homo sapiens
ctcacatgagttcttgaagaatagtcataactagattaag

SEQ ID NO: 92855 - DNA, 40 bp, Homo sapiens
cttaatctagttatgactattcttcaagaactcatgtgag

SEQ ID NO: 92856 - DNA, 40 bp, Homo sapiens
tcacatgagttcttgaagaatagtcataactagattaaga

SEQ ID NO: 92857 - DNA, 40 bp, Homo sapiens
tcttaatctagttatgactattcttcaagaactcatgtga

SEQ ID NO: 92858 - DNA, 40 bp, Homo sapiens
cacatgagttcttgaagaatagtcataactagattaagat

SEQ ID NO: 92859 - DNA, 40 bp, Homo sapiens
atcttaatctagttatgactattcttcaagaactcatgtg

SEQ ID NO: 92860 - DNA, 40 bp, Homo sapiens
acatgagttcttgaagaatagtcataactagattaagatc

SEQ ID NO: 92861 - DNA, 40 bp, Homo sapiens
gatcttaatctagttatgactattcttcaagaactcatgt

SEQ ID NO: 92862 - DNA, 40 bp, Homo sapiens
catgagttcttgaagaatagtcataactagattaagatct

SEQ ID NO: 92863 - DNA, 40 bp, Homo sapiens
agatcttaatctagttatgactattcttcaagaactcatg

SEQ ID NO: 92864 - DNA, 40 bp, Homo sapiens
atgagttcttgaagaatagtcataactagattaagatctg

SEQ ID NO: 92865 - DNA, 40 bp, Homo sapiens
cagatcttaatctagttatgactattcttcaagaactcat

SEQ ID NO: 92866 - DNA, 40 bp, Homo sapiens
tgagttcttgaagaatagtcataactagattaagatctgt

SEQ ID NO: 92867 - DNA, 40 bp, Homo sapiens
acagatcttaatctagttatgactattcttcaagaactca

SEQ ID NO: 92868 - DNA, 40 bp, Homo sapiens
gagttcttgaagaatagtcataactagattaagatctgtg

SEQ ID NO: 92869 - DNA, 40 bp, Homo sapiens
cacagatcttaatctagttatgactattcttcaagaactc

SEQ ID NO: 92870 - DNA, 40 bp, Homo sapiens
agttcttgaagaatagtcataactagattaagatctgtgt

SEQ ID NO: 92871 - DNA, 40 bp, Homo sapiens
acacagatcttaatctagttatgactattcttcaagaact

SEQ ID NO: 92872 - DNA, 40 bp, Homo sapiens
gttcttgaagaatagtcataactagattaagatctgtgtt

SEQ ID NO: 92873 - DNA, 40 bp, Homo sapiens
aacacagatcttaatctagttatgactattcttcaagaac

SEQ ID NO: 92874 - DNA, 40 bp, Homo sapiens
ttcttgaagaatagtcataactagattaagatctgtgttt

SEQ ID NO: 92875 - DNA, 40 bp, Homo sapiens
aaacacagatcttaatctagttatgactattcttcaagaa

SEQ ID NO: 92876 - DNA, 40 bp, Homo sapiens
tcttgaagaatagtcataactagattaagatctgtgtttt

SEQ ID NO: 92877 - DNA, 40 bp, Homo sapiens
aaaacacagatcttaatctagttatgactattcttcaaga

SEQ ID NO: 92878 - DNA, 40 bp, Homo sapiens
cttgaagaatagtcataactagattaagatctgtgtttta

SEQ ID NO: 92879 - DNA, 40 bp, Homo sapiens
taaaacacagatcttaatctagttatgactattcttcaag

SEQ ID NO: 92880 - DNA, 40 bp, Homo sapiens
ttgaagaatagtcataactagattaagatctgtgttttag

SEQ ID NO: 92881 - DNA, 40 bp, Homo sapiens
ctaaaacacagatcttaatctagttatgactattcttcaa

SEQ ID NO: 92882 - DNA, 40 bp, Homo sapiens
tgaagaatagtcataactagattaagatctgtgttttagt

SEQ ID NO: 92883 - DNA, 40 bp, Homo sapiens
actaaaacacagatcttaatctagttatgactattcttca

SEQ ID NO: 92884 - DNA, 40 bp, Homo sapiens
gaagaatagtcataactagattaagatctgtgttttagtt

SEQ ID NO: 92885 - DNA, 40 bp, Homo sapiens
aactaaaacacagatcttaatctagttatgactattcttc

SEQ ID NO: 92886 - DNA, 40 bp, Homo sapiens
aagaatagtcataactagattaagatctgtgttttagttt

SEQ ID NO: 92887 - DNA, 40 bp, Homo sapiens
aaactaaaacacagatcttaatctagttatgactattctt

SEQ ID NO: 92888 - DNA, 40 bp, Homo sapiens
agaatagtcataactagattaagatctgtgttttagttta

SEQ ID NO: 92889 - DNA, 40 bp, Homo sapiens
taaactaaaacacagatcttaatctagttatgactattct

SEQ ID NO: 92890 - DNA, 40 bp, Homo sapiens
gaatagtcataactagattaagatctgtgttttagtttaa

SEQ ID NO: 92891 - DNA, 40 bp, Homo sapiens
ttaaactaaaacacagatcttaatctagttatgactattc

SEQ ID NO: 92892 - DNA, 40 bp, Homo sapiens
aatagtcataactagattaagatctgtgttttagtttaat

SEQ ID NO: 92893 - DNA, 40 bp, Homo sapiens
attaaactaaaacacagatcttaatctagttatgactatt

SEQ ID NO: 92894 - DNA, 40 bp, Homo sapiens
atagtcataactagattaagatctgtgttttagtttaata

SEQ ID NO: 92895 - DNA, 40 bp, Homo sapiens
tattaaactaaaacacagatcttaatctagttatgactat

SEQ ID NO: 92896 - DNA, 40 bp, Homo sapiens
tagtcataactagattaagatctgtgttttagtttaatag

SEQ ID NO: 92897 - DNA, 40 bp, Homo sapiens
ctattaaactaaaacacagatcttaatctagttatgacta

SEQ ID NO: 92898 - DNA, 40 bp, Homo sapiens
agtcataactagattaagatctgtgttttagtttaatagt

SEQ ID NO: 92899 - DNA, 40 bp, Homo sapiens
actattaaactaaaacacagatcttaatctagttatgact

SEQ ID NO: 92900 - DNA, 40 bp, Homo sapiens
gtcataactagattaagatctgtgttttagtttaatagtt

SEQ ID NO: 92901 - DNA, 40 bp, Homo sapiens
aactattaaactaaaacacagatcttaatctagttatgac

SEQ ID NO: 92902 - DNA, 40 bp, Homo sapiens
tcataactagattaagatctgtgttttagtttaatagttt

SEQ ID NO: 92903 - DNA, 40 bp, Homo sapiens
aaactattaaactaaaacacagatcttaatctagttatga

SEQ ID NO: 92904 - DNA, 40 bp, Homo sapiens
cataactagattaagatctgtgttttagtttaatagtttg

SEQ ID NO: 92905 - DNA, 40 bp, Homo sapiens
caaactattaaactaaaacacagatcttaatctagttatg

SEQ ID NO: 92906 - DNA, 40 bp, Homo sapiens
ataactagattaagatctgtgttttagtttaatagtttga

SEQ ID NO: 92907 - DNA, 40 bp, Homo sapiens
tcaaactattaaactaaaacacagatcttaatctagttat

SEQ ID NO: 92908 - DNA, 40 bp, Homo sapiens
taactagattaagatctgtgttttagtttaatagtttgaa

SEQ ID NO: 92909 - DNA, 40 bp, Homo sapiens
ttcaaactattaaactaaaacacagatcttaatctagtta

SEQ ID NO: 92910 - DNA, 40 bp, Homo sapiens
aactagattaagatctgtgttttagtttaatagtttgaag

SEQ ID NO: 92911 - DNA, 40 bp, Homo sapiens
cttcaaactattaaactaaaacacagatcttaatctagtt

SEQ ID NO: 92912 - DNA, 40 bp, Homo sapiens
actagattaagatctgtgttttagtttaatagtttgaagt

SEQ ID NO: 92913 - DNA, 40 bp, Homo sapiens
acttcaaactattaaactaaaacacagatcttaatctagt

SEQ ID NO: 92914 - DNA, 40 bp, Homo sapiens
ctagattaagatctgtgttttagtttaatagtttgaagtg

SEQ ID NO: 92915 - DNA, 40 bp, Homo sapiens
cacttcaaactattaaactaaaacacagatcttaatctag

SEQ ID NO: 92916 - DNA, 40 bp, Homo sapiens
tagattaagatctgtgttttagtttaatagtttgaagtgc

SEQ ID NO: 92917 - DNA, 40 bp, Homo sapiens
gcacttcaaactattaaactaaaacacagatcttaatcta

SEQ ID NO: 92918 - DNA, 40 bp, Homo sapiens
agattaagatctgtgttttagtttaatagtttgaagtgcc

SEQ ID NO: 92919 - DNA, 40 bp, Homo sapiens
ggcacttcaaactattaaactaaaacacagatcttaatct

SEQ ID NO: 92920 - DNA, 40 bp, Homo sapiens
gattaagatctgtgttttagtttaatagtttgaagtgcct

SEQ ID NO: 92921 - DNA, 40 bp, Homo sapiens
aggcacttcaaactattaaactaaaacacagatcttaatc

SEQ ID NO: 92922 - DNA, 40 bp, Homo sapiens
attaagatctgtgttttagtttaatagtttgaagtgcctg

SEQ ID NO: 92923 - DNA, 40 bp, Homo sapiens
caggcacttcaaactattaaactaaaacacagatcttaat

SEQ ID NO: 92924 - DNA, 40 bp, Homo sapiens
ttaagatctgtgttttagtttaatagtttgaagtgcctgt

SEQ ID NO: 92925 - DNA, 40 bp, Homo sapiens
acaggcacttcaaactattaaactaaaacacagatcttaa

SEQ ID NO: 92926 - DNA, 40 bp, Homo sapiens
taagatctgtgttttagtttaatagtttgaagtgcctgtt

SEQ ID NO: 92927 - DNA, 40 bp, Homo sapiens
aacaggcacttcaaactattaaactaaaacacagatctta

SEQ ID NO: 92928 - DNA, 40 bp, Homo sapiens
aagatctgtgttttagtttaatagtttgaagtgcctgttt

SEQ ID NO: 92929 - DNA, 40 bp, Homo sapiens
aaacaggcacttcaaactattaaactaaaacacagatctt

SEQ ID NO: 92930 - DNA, 40 bp, Homo sapiens
agatctgtgttttagtttaatagtttgaagtgcctgtttg

SEQ ID NO: 92931 - DNA, 40 bp, Homo sapiens
caaacaggcacttcaaactattaaactaaaacacagatct

SEQ ID NO: 92932 - DNA, 40 bp, Homo sapiens
gatctgtgttttagtttaatagtttgaagtgcctgtttgg

SEQ ID NO: 92933 - DNA, 40 bp, Homo sapiens
ccaaacaggcacttcaaactattaaactaaaacacagatc

SEQ ID NO: 92934 - DNA, 40 bp, Homo sapiens
atctgtgttttagtttaatagtttgaagtgcctgtttggg

SEQ ID NO: 92935 - DNA, 40 bp, Homo sapiens
cccaaacaggcacttcaaactattaaactaaaacacagat

SEQ ID NO: 92936 - DNA, 40 bp, Homo sapiens
tctgtgttttagtttaatagtttgaagtgcctgtttggga

SEQ ID NO: 92937 - DNA, 40 bp, Homo sapiens
tcccaaacaggcacttcaaactattaaactaaaacacaga

SEQ ID NO: 92938 - DNA, 40 bp, Homo sapiens
ctgtgttttagtttaatagtttgaagtgcctgtttgggat

SEQ ID NO: 92939 - DNA, 40 bp, Homo sapiens
atcccaaacaggcacttcaaactattaaactaaaacacag

SEQ ID NO: 92940 - DNA, 40 bp, Homo sapiens
tgtgttttagtttaatagtttgaagtgcctgtttgggata

SEQ ID NO: 92941 - DNA, 40 bp, Homo sapiens
tatcccaaacaggcacttcaaactattaaactaaaacaca

SEQ ID NO: 92942 - DNA, 40 bp, Homo sapiens
gtgttttagtttaatagtttgaagtgcctgtttgggataa

SEQ ID NO: 92943 - DNA, 40 bp, Homo sapiens
ttatcccaaacaggcacttcaaactattaaactaaaacac

SEQ ID NO: 92944 - DNA, 40 bp, Homo sapiens
tgttttagtttaatagtttgaagtgcctgtttgggataat

SEQ ID NO: 92945 - DNA, 40 bp, Homo sapiens
attatcccaaacaggcacttcaaactattaaactaaaaca

SEQ ID NO: 92946 - DNA, 40 bp, Homo sapiens
gttttagtttaatagtttgaagtgcctgtttgggataatg

SEQ ID NO: 92947 - DNA, 40 bp, Homo sapiens
cattatcccaaacaggcacttcaaactattaaactaaaac

SEQ ID NO: 92948 - DNA, 40 bp, Homo sapiens
ttttagtttaatagtttgaagtgcctgtttgggataatga

SEQ ID NO: 92949 - DNA, 40 bp, Homo sapiens
tcattatcccaaacaggcacttcaaactattaaactaaaa

SEQ ID NO: 92950 - DNA, 40 bp, Homo sapiens
tttagtttaatagtttgaagtgcctgtttgggataatgat

SEQ ID NO: 92951 - DNA, 40 bp, Homo sapiens
atcattatcccaaacaggcacttcaaactattaaactaaa

SEQ ID NO: 92952 - DNA, 40 bp, Homo sapiens
ttagtttaatagtttgaagtgcctgtttgggataatgata

SEQ ID NO: 92953 - DNA, 40 bp, Homo sapiens
tatcattatcccaaacaggcacttcaaactattaaactaa

SEQ ID NO: 92954 - DNA, 40 bp, Homo sapiens
tagtttaatagtttgaagtgcctgtttgggataatgatag

SEQ ID NO: 92955 - DNA, 40 bp, Homo sapiens
ctatcattatcccaaacaggcacttcaaactattaaacta

SEQ ID NO: 92956 - DNA, 40 bp, Homo sapiens
agtttaatagtttgaagtgcctgtttgggataatgatagg

SEQ ID NO: 92957 - DNA, 40 bp, Homo sapiens
cctatcattatcccaaacaggcacttcaaactattaaact

SEQ ID NO: 92958 - DNA, 40 bp, Homo sapiens
gtttaatagtttgaagtgcctgtttgggataatgataggt

SEQ ID NO: 92959 - DNA, 40 bp, Homo sapiens
acctatcattatcccaaacaggcacttcaaactattaaac

SEQ ID NO: 92960 - DNA, 40 bp, Homo sapiens
tttaatagtttgaagtgcctgtttgggataatgataggta

SEQ ID NO: 92961 - DNA, 40 bp, Homo sapiens
tacctatcattatcccaaacaggcacttcaaactattaaa

SEQ ID NO: 92962 - DNA, 40 bp, Homo sapiens
ttaatagtttgaagtgcctgtttgggataatgataggtaa

SEQ ID NO: 92963 - DNA, 40 bp, Homo sapiens
ttacctatcattatcccaaacaggcacttcaaactattaa

SEQ ID NO: 92964 - DNA, 40 bp, Homo sapiens
taatagtttgaagtgcctgtttgggataatgataggtaat

SEQ ID NO: 92965 - DNA, 40 bp, Homo sapiens
attacctatcattatcccaaacaggcacttcaaactatta

SEQ ID NO: 92966 - DNA, 40 bp, Homo sapiens
aatagtttgaagtgcctgtttgggataatgataggtaatt

SEQ ID NO: 92967 - DNA, 40 bp, Homo sapiens
aattacctatcattatcccaaacaggcacttcaaactatt

SEQ ID NO: 92968 - DNA, 40 bp, Homo sapiens
atagtttgaagtgcctgtttgggataatgataggtaattt

SEQ ID NO: 92969 - DNA, 40 bp, Homo sapiens
aaattacctatcattatcccaaacaggcacttcaaactat

SEQ ID NO: 92970 - DNA, 40 bp, Homo sapiens
tagtttgaagtgcctgtttgggataatgataggtaattta

SEQ ID NO: 92971 - DNA, 40 bp, Homo sapiens
taaattacctatcattatcccaaacaggcacttcaaacta

SEQ ID NO: 92972 - DNA, 40 bp, Homo sapiens
agtttgaagtgcctgtttgggataatgataggtaatttag

SEQ ID NO: 92973 - DNA, 40 bp, Homo sapiens
ctaaattacctatcattatcccaaacaggcacttcaaact

SEQ ID NO: 92974 - DNA, 40 bp, Homo sapiens
gtttgaagtgcctgtttgggataatgataggtaatttaga

SEQ ID NO: 92975 - DNA, 40 bp, Homo sapiens
tctaaattacctatcattatcccaaacaggcacttcaaac

SEQ ID NO: 92976 - DNA, 40 bp, Homo sapiens
tttgaagtgcctgtttgggataatgataggtaatttagat

SEQ ID NO: 92977 - DNA, 40 bp, Homo sapiens
atctaaattacctatcattatcccaaacaggcacttcaaa

SEQ ID NO: 92978 - DNA, 40 bp, Homo sapiens
ttgaagtgcctgtttgggataatgataggtaatttagatg

SEQ ID NO: 92979 - DNA, 40 bp, Homo sapiens
catctaaattacctatcattatcccaaacaggcacttcaa

SEQ ID NO: 92980 - DNA, 40 bp, Homo sapiens
tgaagtgcctgtttgggataatgataggtaatttagatga

SEQ ID NO: 92981 - DNA, 40 bp, Homo sapiens
tcatctaaattacctatcattatcccaaacaggcacttca

SEQ ID NO: 92982 - DNA, 40 bp, Homo sapiens
gaagtgcctgtttgggataatgataggtaatttagatgaa

SEQ ID NO: 92983 - DNA, 40 bp, Homo sapiens
ttcatctaaattacctatcattatcccaaacaggcacttc

SEQ ID NO: 92984 - DNA, 40 bp, Homo sapiens
aagtgcctgtttgggataatgataggtaatttagatgaat

SEQ ID NO: 92985 - DNA, 40 bp, Homo sapiens
attcatctaaattacctatcattatcccaaacaggcactt

SEQ ID NO: 92986 - DNA, 40 bp, Homo sapiens
agtgcctgtttgggataatgataggtaatttagatgaatt

SEQ ID NO: 92987 - DNA, 40 bp, Homo sapiens
aattcatctaaattacctatcattatcccaaacaggcact

SEQ ID NO: 92988 - DNA, 40 bp, Homo sapiens
gtgcctgtttgggataatgataggtaatttagatgaattt

SEQ ID NO: 92989 - DNA, 40 bp, Homo sapiens
aaattcatctaaattacctatcattatcccaaacaggcac

SEQ ID NO: 92990 - DNA, 40 bp, Homo sapiens
tgcctgtttgggataatgataggtaatttagatgaattta

SEQ ID NO: 92991 - DNA, 40 bp, Homo sapiens
taaattcatctaaattacctatcattatcccaaacaggca

SEQ ID NO: 92992 - DNA, 40 bp, Homo sapiens
gcctgtttgggataatgataggtaatttagatgaatttag

SEQ ID NO: 92993 - DNA, 40 bp, Homo sapiens
ctaaattcatctaaattacctatcattatcccaaacaggc

SEQ ID NO: 92994 - DNA, 40 bp, Homo sapiens
cctgtttgggataatgataggtaatttagatgaatttagg

SEQ ID NO: 92995 - DNA, 40 bp, Homo sapiens
cctaaattcatctaaattacctatcattatcccaaacagg

SEQ ID NO: 92996 - DNA, 40 bp, Homo sapiens
ctgtttgggataatgataggtaatttagatgaatttaggg

SEQ ID NO: 92997 - DNA, 40 bp, Homo sapiens
ccctaaattcatctaaattacctatcattatcccaaacag

SEQ ID NO: 92998 - DNA, 40 bp, Homo sapiens
tgtttgggataatgataggtaatttagatgaatttagggg

SEQ ID NO: 92999 - DNA, 40 bp, Homo sapiens
cccctaaattcatctaaattacctatcattatcccaaaca

SEQ ID NO: 93000 - DNA, 40 bp, Homo sapiens
gtttgggataatgataggtaatttagatgaatttagggga

SEQ ID NO: 93001 - DNA, 40 bp, Homo sapiens
tcccctaaattcatctaaattacctatcattatcccaaac

SEQ ID NO: 93002 - DNA, 40 bp, Homo sapiens
tttgggataatgataggtaatttagatgaatttaggggaa

SEQ ID NO: 93003 - DNA, 40 bp, Homo sapiens
ttcccctaaattcatctaaattacctatcattatcccaaa

SEQ ID NO: 93004 - DNA, 40 bp, Homo sapiens
ttgggataatgataggtaatttagatgaatttaggggaaa

SEQ ID NO: 93005 - DNA, 40 bp, Homo sapiens
tttcccctaaattcatctaaattacctatcattatcccaa

SEQ ID NO: 93006 - DNA, 40 bp, Homo sapiens
tgggataatgataggtaatttagatgaatttaggggaaaa

SEQ ID NO: 93007 - DNA, 40 bp, Homo sapiens
ttttcccctaaattcatctaaattacctatcattatccca

SEQ ID NO: 93008 - DNA, 40 bp, Homo sapiens
gggataatgataggtaatttagatgaatttaggggaaaaa

SEQ ID NO: 93009 - DNA, 40 bp, Homo sapiens
tttttcccctaaattcatctaaattacctatcattatccc

SEQ ID NO: 93010 - DNA, 40 bp, Homo sapiens
ggataatgataggtaatttagatgaatttaggggaaaaaa

SEQ ID NO: 93011 - DNA, 40 bp, Homo sapiens
ttttttcccctaaattcatctaaattacctatcattatcc

SEQ ID NO: 93012 - DNA, 40 bp, Homo sapiens
gataatgataggtaatttagatgaatttaggggaaaaaaa

SEQ ID NO: 93013 - DNA, 40 bp, Homo sapiens
tttttttcccctaaattcatctaaattacctatcattatc

SEQ ID NO: 93014 - DNA, 40 bp, Homo sapiens
ataatgataggtaatttagatgaatttaggggaaaaaaaa

SEQ ID NO: 93015 - DNA, 40 bp, Homo sapiens
ttttttttcccctaaattcatctaaattacctatcattat

SEQ ID NO: 93016 - DNA, 40 bp, Homo sapiens
taatgataggtaatttagatgaatttaggggaaaaaaaag

SEQ ID NO: 93017 - DNA, 40 bp, Homo sapiens
cttttttttcccctaaattcatctaaattacctatcatta

SEQ ID NO: 93018 - DNA, 40 bp, Homo sapiens
aatgataggtaatttagatgaatttaggggaaaaaaaagt

SEQ ID NO: 93019 - DNA, 40 bp, Homo sapiens
acttttttttcccctaaattcatctaaattacctatcatt

SEQ ID NO: 93020 - DNA, 40 bp, Homo sapiens
atgataggtaatttagatgaatttaggggaaaaaaaagtt

SEQ ID NO: 93021 - DNA, 40 bp, Homo sapiens
aacttttttttcccctaaattcatctaaattacctatcat

SEQ ID NO: 93022 - DNA, 40 bp, Homo sapiens
tgataggtaatttagatgaatttaggggaaaaaaaagtta

SEQ ID NO: 93023 - DNA, 40 bp, Homo sapiens
taacttttttttcccctaaattcatctaaattacctatca

SEQ ID NO: 93024 - DNA, 40 bp, Homo sapiens
gataggtaatttagatgaatttaggggaaaaaaaagttat

SEQ ID NO: 93025 - DNA, 40 bp, Homo sapiens
ataacttttttttcccctaaattcatctaaattacctatc

SEQ ID NO: 93026 - DNA, 40 bp, Homo sapiens
ataggtaatttagatgaatttaggggaaaaaaaagttatc

SEQ ID NO: 93027 - DNA, 40 bp, Homo sapiens
gataacttttttttcccctaaattcatctaaattacctat

SEQ ID NO: 93028 - DNA, 40 bp, Homo sapiens
taggtaatttagatgaatttaggggaaaaaaaagttatct

SEQ ID NO: 93029 - DNA, 40 bp, Homo sapiens
agataacttttttttcccctaaattcatctaaattaccta

SEQ ID NO: 93030 - DNA, 40 bp, Homo sapiens
aggtaatttagatgaatttaggggaaaaaaaagttatctg

SEQ ID NO: 93031 - DNA, 40 bp, Homo sapiens
cagataacttttttttcccctaaattcatctaaattacct

SEQ ID NO: 93032 - DNA, 40 bp, Homo sapiens
ggtaatttagatgaatttaggggaaaaaaaagttatctgc

SEQ ID NO: 93033 - DNA, 40 bp, Homo sapiens
gcagataacttttttttcccctaaattcatctaaattacc

SEQ ID NO: 93034 - DNA, 40 bp, Homo sapiens
gtaatttagatgaatttaggggaaaaaaaagttatctgca

SEQ ID NO: 93035 - DNA, 40 bp, Homo sapiens
tgcagataacttttttttcccctaaattcatctaaattac

SEQ ID NO: 93036 - DNA, 40 bp, Homo sapiens
taatttagatgaatttaggggaaaaaaaagttatctgcag

SEQ ID NO: 93037 - DNA, 40 bp, Homo sapiens
ctgcagataacttttttttcccctaaattcatctaaatta

SEQ ID NO: 93038 - DNA, 40 bp, Homo sapiens
aatttagatgaatttaggggaaaaaaaagttatctgcaga

SEQ ID NO: 93039 - DNA, 40 bp, Homo sapiens
tctgcagataacttttttttcccctaaattcatctaaatt

SEQ ID NO: 93040 - DNA, 40 bp, Homo sapiens
atttagatgaatttaggggaaaaaaaagttatctgcagat

SEQ ID NO: 93041 - DNA, 40 bp, Homo sapiens
atctgcagataacttttttttcccctaaattcatctaaat

SEQ ID NO: 93042 - DNA, 40 bp, Homo sapiens
tttagatgaatttaggggaaaaaaaagttatctgcagata

SEQ ID NO: 93043 - DNA, 40 bp, Homo sapiens
tatctgcagataacttttttttcccctaaattcatctaaa

SEQ ID NO: 93044 - DNA, 40 bp, Homo sapiens
ttagatgaatttaggggaaaaaaaagttatctgcagatat

SEQ ID NO: 93045 - DNA, 40 bp, Homo sapiens
atatctgcagataacttttttttcccctaaattcatctaa

SEQ ID NO: 93046 - DNA, 40 bp, Homo sapiens
tagatgaatttaggggaaaaaaaagttatctgcagatatg

SEQ ID NO: 93047 - DNA, 40 bp, Homo sapiens
catatctgcagataacttttttttcccctaaattcatcta

SEQ ID NO: 93048 - DNA, 40 bp, Homo sapiens
agatgaatttaggggaaaaaaaagttatctgcagatatgt

SEQ ID NO: 93049 - DNA, 40 bp, Homo sapiens
acatatctgcagataacttttttttcccctaaattcatct

SEQ ID NO: 93050 - DNA, 40 bp, Homo sapiens
gatgaatttaggggaaaaaaaagttatctgcagatatgtt

SEQ ID NO: 93051 - DNA, 40 bp, Homo sapiens
aacatatctgcagataacttttttttcccctaaattcatc

SEQ ID NO: 93052 - DNA, 40 bp, Homo sapiens
atgaatttaggggaaaaaaaagttatctgcagatatgttg

SEQ ID NO: 93053 - DNA, 40 bp, Homo sapiens
caacatatctgcagataacttttttttcccctaaattcat

SEQ ID NO: 93054 - DNA, 40 bp, Homo sapiens
tgaatttaggggaaaaaaaagttatctgcagatatgttga

SEQ ID NO: 93055 - DNA, 40 bp, Homo sapiens
tcaacatatctgcagataacttttttttcccctaaattca

SEQ ID NO: 93056 - DNA, 40 bp, Homo sapiens
gaatttaggggaaaaaaaagttatctgcagatatgttgag

SEQ ID NO: 93057 - DNA, 40 bp, Homo sapiens
ctcaacatatctgcagataacttttttttcccctaaattc

SEQ ID NO: 93058 - DNA, 40 bp, Homo sapiens
aatttaggggaaaaaaaagttatctgcagatatgttgagg

SEQ ID NO: 93059 - DNA, 40 bp, Homo sapiens
cctcaacatatctgcagataacttttttttcccctaaatt

SEQ ID NO: 93060 - DNA, 40 bp, Homo sapiens
atttaggggaaaaaaaagttatctgcagatatgttgaggg

SEQ ID NO: 93061 - DNA, 40 bp, Homo sapiens
ccctcaacatatctgcagataacttttttttcccctaaat

SEQ ID NO: 93062 - DNA, 40 bp, Homo sapiens
tttaggggaaaaaaaagttatctgcagatatgttgagggc

SEQ ID NO: 93063 - DNA, 40 bp, Homo sapiens
gccctcaacatatctgcagataacttttttttcccctaaa

SEQ ID NO: 93064 - DNA, 40 bp, Homo sapiens
ttaggggaaaaaaaagttatctgcagatatgttgagggcc

SEQ ID NO: 93065 - DNA, 40 bp, Homo sapiens
ggccctcaacatatctgcagataacttttttttcccctaa

SEQ ID NO: 93066 - DNA, 40 bp, Homo sapiens
taggggaaaaaaaagttatctgcagatatgttgagggccc

SEQ ID NO: 93067 - DNA, 40 bp, Homo sapiens
gggccctcaacatatctgcagataacttttttttccccta

SEQ ID NO: 93068 - DNA, 40 bp, Homo sapiens
aggggaaaaaaaagttatctgcagatatgttgagggccca

SEQ ID NO: 93069 - DNA, 40 bp, Homo sapiens
tgggccctcaacatatctgcagataacttttttttcccct

SEQ ID NO: 93070 - DNA, 40 bp, Homo sapiens
ggggaaaaaaaagttatctgcagatatgttgagggcccat

SEQ ID NO: 93071 - DNA, 40 bp, Homo sapiens
atgggccctcaacatatctgcagataacttttttttcccc

SEQ ID NO: 93072 - DNA, 40 bp, Homo sapiens
gggaaaaaaaagttatctgcagatatgttgagggcccatc

SEQ ID NO: 93073 - DNA, 40 bp, Homo sapiens
gatgggccctcaacatatctgcagataacttttttttccc

SEQ ID NO: 93074 - DNA, 40 bp, Homo sapiens
ggaaaaaaaagttatctgcagatatgttgagggcccatct

SEQ ID NO: 93075 - DNA, 40 bp, Homo sapiens
agatgggccctcaacatatctgcagataacttttttttcc

SEQ ID NO: 93076 - DNA, 40 bp, Homo sapiens
gaaaaaaaagttatctgcagatatgttgagggcccatctc

SEQ ID NO: 93077 - DNA, 40 bp, Homo sapiens
gagatgggccctcaacatatctgcagataacttttttttc

SEQ ID NO: 93078 - DNA, 40 bp, Homo sapiens
aaaaaaaagttatctgcagatatgttgagggcccatctct

SEQ ID NO: 93079 - DNA, 40 bp, Homo sapiens
agagatgggccctcaacatatctgcagataactttttttt

SEQ ID NO: 93080 - DNA, 40 bp, Homo sapiens
aaaaaaagttatctgcagatatgttgagggcccatctctc

SEQ ID NO: 93081 - DNA, 40 bp, Homo sapiens
gagagatgggccctcaacatatctgcagataacttttttt

SEQ ID NO: 93082 - DNA, 40 bp, Homo sapiens
aaaaaagttatctgcagatatgttgagggcccatctctcc

SEQ ID NO: 93083 - DNA, 40 bp, Homo sapiens
ggagagatgggccctcaacatatctgcagataactttttt

SEQ ID NO: 93084 - DNA, 40 bp, Homo sapiens
aaaaagttatctgcagatatgttgagggcccatctctccc

SEQ ID NO: 93085 - DNA, 40 bp, Homo sapiens
gggagagatgggccctcaacatatctgcagataacttttt

SEQ ID NO: 93086 - DNA, 40 bp, Homo sapiens
aaaagttatctgcagatatgttgagggcccatctctcccc

SEQ ID NO: 93087 - DNA, 40 bp, Homo sapiens
ggggagagatgggccctcaacatatctgcagataactttt

SEQ ID NO: 93088 - DNA, 40 bp, Homo sapiens
aaagttatctgcagatatgttgagggcccatctctccccc

SEQ ID NO: 93089 - DNA, 40 bp, Homo sapiens
gggggagagatgggccctcaacatatctgcagataacttt

SEQ ID NO: 93090 - DNA, 40 bp, Homo sapiens
aagttatctgcagatatgttgagggcccatctctcccccc

SEQ ID NO: 93091 - DNA, 40 bp, Homo sapiens
ggggggagagatgggccctcaacatatctgcagataactt

SEQ ID NO: 93092 - DNA, 40 bp, Homo sapiens
agttatctgcagatatgttgagggcccatctctcccccca

SEQ ID NO: 93093 - DNA, 40 bp, Homo sapiens
tggggggagagatgggccctcaacatatctgcagataact

SEQ ID NO: 93094 - DNA, 40 bp, Homo sapiens
gttatctgcagatatgttgagggcccatctctccccccac

SEQ ID NO: 93095 - DNA, 40 bp, Homo sapiens
gtggggggagagatgggccctcaacatatctgcagataac

SEQ ID NO: 93096 - DNA, 40 bp, Homo sapiens
ttatctgcagatatgttgagggcccatctctccccccaca

SEQ ID NO: 93097 - DNA, 40 bp, Homo sapiens
tgtggggggagagatgggccctcaacatatctgcagataa

SEQ ID NO: 93098 - DNA, 40 bp, Homo sapiens
tatctgcagatatgttgagggcccatctctccccccacac

SEQ ID NO: 93099 - DNA, 40 bp, Homo sapiens
gtgtggggggagagatgggccctcaacatatctgcagata

SEQ ID NO: 93100 - DNA, 40 bp, Homo sapiens
atctgcagatatgttgagggcccatctctccccccacacc

SEQ ID NO: 93101 - DNA, 40 bp, Homo sapiens
ggtgtggggggagagatgggccctcaacatatctgcagat

SEQ ID NO: 93102 - DNA, 40 bp, Homo sapiens
tctgcagatatgttgagggcccatctctccccccacaccc

SEQ ID NO: 93103 - DNA, 40 bp, Homo sapiens
gggtgtggggggagagatgggccctcaacatatctgcaga

SEQ ID NO: 93104 - DNA, 40 bp, Homo sapiens
ctgcagatatgttgagggcccatctctccccccacacccc

SEQ ID NO: 93105 - DNA, 40 bp, Homo sapiens
ggggtgtggggggagagatgggccctcaacatatctgcag

SEQ ID NO: 93106 - DNA, 40 bp, Homo sapiens
tgcagatatgttgagggcccatctctccccccacaccccc

SEQ ID NO: 93107 - DNA, 40 bp, Homo sapiens
gggggtgtggggggagagatgggccctcaacatatctgca

SEQ ID NO: 93108 - DNA, 40 bp, Homo sapiens
gcagatatgttgagggcccatctctccccccacaccccca

SEQ ID NO: 93109 - DNA, 40 bp, Homo sapiens
tgggggtgtggggggagagatgggccctcaacatatctgc

SEQ ID NO: 93110 - DNA, 40 bp, Homo sapiens
cagatatgttgagggcccatctctccccccacacccccac

SEQ ID NO: 93111 - DNA, 40 bp, Homo sapiens
gtgggggtgtggggggagagatgggccctcaacatatctg

SEQ ID NO: 93112 - DNA, 40 bp, Homo sapiens
agatatgttgagggcccatctctccccccacacccccaca

SEQ ID NO: 93113 - DNA, 40 bp, Homo sapiens
tgtgggggtgtggggggagagatgggccctcaacatatct

SEQ ID NO: 93114 - DNA, 40 bp, Homo sapiens
gatatgttgagggcccatctctccccccacacccccacag

SEQ ID NO: 93115 - DNA, 40 bp, Homo sapiens
ctgtgggggtgtggggggagagatgggccctcaacatatc

SEQ ID NO: 93116 - DNA, 40 bp, Homo sapiens
atatgttgagggcccatctctccccccacacccccacaga

SEQ ID NO: 93117 - DNA, 40 bp, Homo sapiens
tctgtgggggtgtggggggagagatgggccctcaacatat

SEQ ID NO: 93118 - DNA, 40 bp, Homo sapiens
tatgttgagggcccatctctccccccacacccccacagag

SEQ ID NO: 93119 - DNA, 40 bp, Homo sapiens
ctctgtgggggtgtggggggagagatgggccctcaacata

SEQ ID NO: 93120 - DNA, 40 bp, Homo sapiens
atgttgagggcccatctctccccccacacccccacagagc

SEQ ID NO: 93121 - DNA, 40 bp, Homo sapiens
gctctgtgggggtgtggggggagagatgggccctcaacat

SEQ ID NO: 93122 - DNA, 40 bp, Homo sapiens
tgttgagggcccatctctccccccacacccccacagagct

SEQ ID NO: 93123 - DNA, 40 bp, Homo sapiens
agctctgtgggggtgtggggggagagatgggccctcaaca

SEQ ID NO: 93124 - DNA, 40 bp, Homo sapiens
gttgagggcccatctctccccccacacccccacagagcta

SEQ ID NO: 93125 - DNA, 40 bp, Homo sapiens
tagctctgtgggggtgtggggggagagatgggccctcaac

SEQ ID NO: 93126 - DNA, 40 bp, Homo sapiens
ttgagggcccatctctccccccacacccccacagagctaa

SEQ ID NO: 93127 - DNA, 40 bp, Homo sapiens
ttagctctgtgggggtgtggggggagagatgggccctcaa

SEQ ID NO: 93128 - DNA, 40 bp, Homo sapiens
tgagggcccatctctccccccacacccccacagagctaac

SEQ ID NO: 93129 - DNA, 40 bp, Homo sapiens
gttagctctgtgggggtgtggggggagagatgggccctca

SEQ ID NO: 93130 - DNA, 40 bp, Homo sapiens
gagggcccatctctccccccacacccccacagagctaact

SEQ ID NO: 93131 - DNA, 40 bp, Homo sapiens
agttagctctgtgggggtgtggggggagagatgggccctc

SEQ ID NO: 93132 - DNA, 40 bp, Homo sapiens
agggcccatctctccccccacacccccacagagctaactg

SEQ ID NO: 93133 - DNA, 40 bp, Homo sapiens
cagttagctctgtgggggtgtggggggagagatgggccct

SEQ ID NO: 93134 - DNA, 40 bp, Homo sapiens
gggcccatctctccccccacacccccacagagctaactgg

SEQ ID NO: 93135 - DNA, 40 bp, Homo sapiens
ccagttagctctgtgggggtgtggggggagagatgggccc

SEQ ID NO: 93136 - DNA, 40 bp, Homo sapiens
ggcccatctctccccccacacccccacagagctaactggg

SEQ ID NO: 93137 - DNA, 40 bp, Homo sapiens
cccagttagctctgtgggggtgtggggggagagatgggcc

SEQ ID NO: 93138 - DNA, 40 bp, Homo sapiens
gcccatctctccccccacacccccacagagctaactgggt

SEQ ID NO: 93139 - DNA, 40 bp, Homo sapiens
acccagttagctctgtgggggtgtggggggagagatgggc

SEQ ID NO: 93140 - DNA, 40 bp, Homo sapiens
cccatctctccccccacacccccacagagctaactgggtt

SEQ ID NO: 93141 - DNA, 40 bp, Homo sapiens
aacccagttagctctgtgggggtgtggggggagagatggg

SEQ ID NO: 93142 - DNA, 40 bp, Homo sapiens
ccatctctccccccacacccccacagagctaactgggtta

SEQ ID NO: 93143 - DNA, 40 bp, Homo sapiens
taacccagttagctctgtgggggtgtggggggagagatgg

SEQ ID NO: 93144 - DNA, 40 bp, Homo sapiens
catctctccccccacacccccacagagctaactgggttac

SEQ ID NO: 93145 - DNA, 40 bp, Homo sapiens
gtaacccagttagctctgtgggggtgtggggggagagatg

SEQ ID NO: 93146 - DNA, 40 bp, Homo sapiens
atctctccccccacacccccacagagctaactgggttaca

SEQ ID NO: 93147 - DNA, 40 bp, Homo sapiens
tgtaacccagttagctctgtgggggtgtggggggagagat

SEQ ID NO: 93148 - DNA, 40 bp, Homo sapiens
tctctccccccacacccccacagagctaactgggttacag

SEQ ID NO: 93149 - DNA, 40 bp, Homo sapiens
ctgtaacccagttagctctgtgggggtgtggggggagaga

SEQ ID NO: 93150 - DNA, 40 bp, Homo sapiens
ctctccccccacacccccacagagctaactgggttacagt

SEQ ID NO: 93151 - DNA, 40 bp, Homo sapiens
actgtaacccagttagctctgtgggggtgtggggggagag

SEQ ID NO: 93152 - DNA, 40 bp, Homo sapiens
tctccccccacacccccacagagctaactgggttacagtg

SEQ ID NO: 93153 - DNA, 40 bp, Homo sapiens
cactgtaacccagttagctctgtgggggtgtggggggaga

SEQ ID NO: 93154 - DNA, 40 bp, Homo sapiens
ctccccccacacccccacagagctaactgggttacagtgt

SEQ ID NO: 93155 - DNA, 40 bp, Homo sapiens
acactgtaacccagttagctctgtgggggtgtggggggag

SEQ ID NO: 93156 - DNA, 40 bp, Homo sapiens
tccccccacacccccacagagctaactgggttacagtgtt

SEQ ID NO: 93157 - DNA, 40 bp, Homo sapiens
aacactgtaacccagttagctctgtgggggtgtgggggga

SEQ ID NO: 93158 - DNA, 40 bp, Homo sapiens
ccccccacacccccacagagctaactgggttacagtgttt

SEQ ID NO: 93159 - DNA, 40 bp, Homo sapiens
aaacactgtaacccagttagctctgtgggggtgtgggggg

SEQ ID NO: 93160 - DNA, 40 bp, Homo sapiens
cccccacacccccacagagctaactgggttacagtgtttt

SEQ ID NO: 93161 - DNA, 40 bp, Homo sapiens
aaaacactgtaacccagttagctctgtgggggtgtggggg

SEQ ID NO: 93162 - DNA, 40 bp, Homo sapiens
ccccacacccccacagagctaactgggttacagtgtttta

SEQ ID NO: 93163 - DNA, 40 bp, Homo sapiens
taaaacactgtaacccagttagctctgtgggggtgtgggg

SEQ ID NO: 93164 - DNA, 40 bp, Homo sapiens
cccacacccccacagagctaactgggttacagtgttttat

SEQ ID NO: 93165 - DNA, 40 bp, Homo sapiens
ataaaacactgtaacccagttagctctgtgggggtgtggg

SEQ ID NO: 93166 - DNA, 40 bp, Homo sapiens
ccacacccccacagagctaactgggttacagtgttttatc

SEQ ID NO: 93167 - DNA, 40 bp, Homo sapiens
gataaaacactgtaacccagttagctctgtgggggtgtgg

SEQ ID NO: 93168 - DNA, 40 bp, Homo sapiens
cacacccccacagagctaactgggttacagtgttttatcc

SEQ ID NO: 93169 - DNA, 40 bp, Homo sapiens
ggataaaacactgtaacccagttagctctgtgggggtgtg

SEQ ID NO: 93170 - DNA, 40 bp, Homo sapiens
acacccccacagagctaactgggttacagtgttttatccg

SEQ ID NO: 93171 - DNA, 40 bp, Homo sapiens
cggataaaacactgtaacccagttagctctgtgggggtgt

SEQ ID NO: 93172 - DNA, 40 bp, Homo sapiens
cacccccacagagctaactgggttacagtgttttatccga

SEQ ID NO: 93173 - DNA, 40 bp, Homo sapiens
tcggataaaacactgtaacccagttagctctgtgggggtg

SEQ ID NO: 93174 - DNA, 40 bp, Homo sapiens
acccccacagagctaactgggttacagtgttttatccgaa

SEQ ID NO: 93175 - DNA, 40 bp, Homo sapiens
ttcggataaaacactgtaacccagttagctctgtgggggt

SEQ ID NO: 93176 - DNA, 40 bp, Homo sapiens
cccccacagagctaactgggttacagtgttttatccgaaa

SEQ ID NO: 93177 - DNA, 40 bp, Homo sapiens
tttcggataaaacactgtaacccagttagctctgtggggg

SEQ ID NO: 93178 - DNA, 40 bp, Homo sapiens
ccccacagagctaactgggttacagtgttttatccgaaag

SEQ ID NO: 93179 - DNA, 40 bp, Homo sapiens
ctttcggataaaacactgtaacccagttagctctgtgggg

SEQ ID NO: 93180 - DNA, 40 bp, Homo sapiens
cccacagagctaactgggttacagtgttttatccgaaagt

SEQ ID NO: 93181 - DNA, 40 bp, Homo sapiens
actttcggataaaacactgtaacccagttagctctgtggg

SEQ ID NO: 93182 - DNA, 40 bp, Homo sapiens
ccacagagctaactgggttacagtgttttatccgaaagtt

SEQ ID NO: 93183 - DNA, 40 bp, Homo sapiens
aactttcggataaaacactgtaacccagttagctctgtgg

SEQ ID NO: 93184 - DNA, 40 bp, Homo sapiens
cacagagctaactgggttacagtgttttatccgaaagttt

SEQ ID NO: 93185 - DNA, 40 bp, Homo sapiens
aaactttcggataaaacactgtaacccagttagctctgtg

SEQ ID NO: 93186 - DNA, 40 bp, Homo sapiens
acagagctaactgggttacagtgttttatccgaaagtttc

SEQ ID NO: 93187 - DNA, 40 bp, Homo sapiens
gaaactttcggataaaacactgtaacccagttagctctgt

SEQ ID NO: 93188 - DNA, 40 bp, Homo sapiens
cagagctaactgggttacagtgttttatccgaaagtttcc

SEQ ID NO: 93189 - DNA, 40 bp, Homo sapiens
ggaaactttcggataaaacactgtaacccagttagctctg

SEQ ID NO: 93190 - DNA, 40 bp, Homo sapiens
agagctaactgggttacagtgttttatccgaaagtttcca

SEQ ID NO: 93191 - DNA, 40 bp, Homo sapiens
tggaaactttcggataaaacactgtaacccagttagctct

SEQ ID NO: 93192 - DNA, 40 bp, Homo sapiens
gagctaactgggttacagtgttttatccgaaagtttccaa

SEQ ID NO: 93193 - DNA, 40 bp, Homo sapiens
ttggaaactttcggataaaacactgtaacccagttagctc

SEQ ID NO: 93194 - DNA, 40 bp, Homo sapiens
agctaactgggttacagtgttttatccgaaagtttccaat

SEQ ID NO: 93195 - DNA, 40 bp, Homo sapiens
attggaaactttcggataaaacactgtaacccagttagct

SEQ ID NO: 93196 - DNA, 40 bp, Homo sapiens
gctaactgggttacagtgttttatccgaaagtttccaatt

SEQ ID NO: 93197 - DNA, 40 bp, Homo sapiens
aattggaaactttcggataaaacactgtaacccagttagc

SEQ ID NO: 93198 - DNA, 40 bp, Homo sapiens
ctaactgggttacagtgttttatccgaaagtttccaattc

SEQ ID NO: 93199 - DNA, 40 bp, Homo sapiens
gaattggaaactttcggataaaacactgtaacccagttag

SEQ ID NO: 93200 - DNA, 40 bp, Homo sapiens
taactgggttacagtgttttatccgaaagtttccaattcc

SEQ ID NO: 93201 - DNA, 40 bp, Homo sapiens
ggaattggaaactttcggataaaacactgtaacccagtta

SEQ ID NO: 93202 - DNA, 40 bp, Homo sapiens
aactgggttacagtgttttatccgaaagtttccaattcca

SEQ ID NO: 93203 - DNA, 40 bp, Homo sapiens
tggaattggaaactttcggataaaacactgtaacccagtt

SEQ ID NO: 93204 - DNA, 40 bp, Homo sapiens
actgggttacagtgttttatccgaaagtttccaattccac

SEQ ID NO: 93205 - DNA, 40 bp, Homo sapiens
gtggaattggaaactttcggataaaacactgtaacccagt

SEQ ID NO: 93206 - DNA, 40 bp, Homo sapiens
ctgggttacagtgttttatccgaaagtttccaattccact

SEQ ID NO: 93207 - DNA, 40 bp, Homo sapiens
agtggaattggaaactttcggataaaacactgtaacccag

SEQ ID NO: 93208 - DNA, 40 bp, Homo sapiens
tgggttacagtgttttatccgaaagtttccaattccactg

SEQ ID NO: 93209 - DNA, 40 bp, Homo sapiens
cagtggaattggaaactttcggataaaacactgtaaccca

SEQ ID NO: 93210 - DNA, 40 bp, Homo sapiens
gggttacagtgttttatccgaaagtttccaattccactgt

SEQ ID NO: 93211 - DNA, 40 bp, Homo sapiens
acagtggaattggaaactttcggataaaacactgtaaccc

SEQ ID NO: 93212 - DNA, 40 bp, Homo sapiens
ggttacagtgttttatccgaaagtttccaattccactgtc

SEQ ID NO: 93213 - DNA, 40 bp, Homo sapiens
gacagtggaattggaaactttcggataaaacactgtaacc

SEQ ID NO: 93214 - DNA, 40 bp, Homo sapiens
gttacagtgttttatccgaaagtttccaattccactgtct

SEQ ID NO: 93215 - DNA, 40 bp, Homo sapiens
agacagtggaattggaaactttcggataaaacactgtaac

SEQ ID NO: 93216 - DNA, 40 bp, Homo sapiens
ttacagtgttttatccgaaagtttccaattccactgtctt

SEQ ID NO: 93217 - DNA, 40 bp, Homo sapiens
aagacagtggaattggaaactttcggataaaacactgtaa

SEQ ID NO: 93218 - DNA, 40 bp, Homo sapiens
tacagtgttttatccgaaagtttccaattccactgtcttg

SEQ ID NO: 93219 - DNA, 40 bp, Homo sapiens
caagacagtggaattggaaactttcggataaaacactgta

SEQ ID NO: 93220 - DNA, 40 bp, Homo sapiens
acagtgttttatccgaaagtttccaattccactgtcttgt

SEQ ID NO: 93221 - DNA, 40 bp, Homo sapiens
acaagacagtggaattggaaactttcggataaaacactgt

SEQ ID NO: 93222 - DNA, 40 bp, Homo sapiens
cagtgttttatccgaaagtttccaattccactgtcttgtg

SEQ ID NO: 93223 - DNA, 40 bp, Homo sapiens
cacaagacagtggaattggaaactttcggataaaacactg

SEQ ID NO: 93224 - DNA, 40 bp, Homo sapiens
agtgttttatccgaaagtttccaattccactgtcttgtgt

SEQ ID NO: 93225 - DNA, 40 bp, Homo sapiens
acacaagacagtggaattggaaactttcggataaaacact

SEQ ID NO: 93226 - DNA, 40 bp, Homo sapiens
gtgttttatccgaaagtttccaattccactgtcttgtgtt

SEQ ID NO: 93227 - DNA, 40 bp, Homo sapiens
aacacaagacagtggaattggaaactttcggataaaacac

SEQ ID NO: 93228 - DNA, 40 bp, Homo sapiens
tgttttatccgaaagtttccaattccactgtcttgtgttt

SEQ ID NO: 93229 - DNA, 40 bp, Homo sapiens
aaacacaagacagtggaattggaaactttcggataaaaca

SEQ ID NO: 93230 - DNA, 40 bp, Homo sapiens
gttttatccgaaagtttccaattccactgtcttgtgtttt

SEQ ID NO: 93231 - DNA, 40 bp, Homo sapiens
aaaacacaagacagtggaattggaaactttcggataaaac

SEQ ID NO: 93232 - DNA, 40 bp, Homo sapiens
ttttatccgaaagtttccaattccactgtcttgtgttttc

SEQ ID NO: 93233 - DNA, 40 bp, Homo sapiens
gaaaacacaagacagtggaattggaaactttcggataaaa

SEQ ID NO: 93234 - DNA, 40 bp, Homo sapiens
tttatccgaaagtttccaattccactgtcttgtgttttca

SEQ ID NO: 93235 - DNA, 40 bp, Homo sapiens
tgaaaacacaagacagtggaattggaaactttcggataaa

SEQ ID NO: 93236 - DNA, 40 bp, Homo sapiens
ttatccgaaagtttccaattccactgtcttgtgttttcat

SEQ ID NO: 93237 - DNA, 40 bp, Homo sapiens
atgaaaacacaagacagtggaattggaaactttcggataa

SEQ ID NO: 93238 - DNA, 40 bp, Homo sapiens
tatccgaaagtttccaattccactgtcttgtgttttcatg

SEQ ID NO: 93239 - DNA, 40 bp, Homo sapiens
catgaaaacacaagacagtggaattggaaactttcggata

SEQ ID NO: 93240 - DNA, 40 bp, Homo sapiens
atccgaaagtttccaattccactgtcttgtgttttcatgt

SEQ ID NO: 93241 - DNA, 40 bp, Homo sapiens
acatgaaaacacaagacagtggaattggaaactttcggat

SEQ ID NO: 93242 - DNA, 40 bp, Homo sapiens
tccgaaagtttccaattccactgtcttgtgttttcatgtt

SEQ ID NO: 93243 - DNA, 40 bp, Homo sapiens
aacatgaaaacacaagacagtggaattggaaactttcgga

SEQ ID NO: 93244 - DNA, 40 bp, Homo sapiens
ccgaaagtttccaattccactgtcttgtgttttcatgttg

SEQ ID NO: 93245 - DNA, 40 bp, Homo sapiens
caacatgaaaacacaagacagtggaattggaaactttcgg

SEQ ID NO: 93246 - DNA, 40 bp, Homo sapiens
cgaaagtttccaattccactgtcttgtgttttcatgttga

SEQ ID NO: 93247 - DNA, 40 bp, Homo sapiens
tcaacatgaaaacacaagacagtggaattggaaactttcg

SEQ ID NO: 93248 - DNA, 40 bp, Homo sapiens
gaaagtttccaattccactgtcttgtgttttcatgttgaa

SEQ ID NO: 93249 - DNA, 40 bp, Homo sapiens
ttcaacatgaaaacacaagacagtggaattggaaactttc

SEQ ID NO: 93250 - DNA, 40 bp, Homo sapiens
aaagtttccaattccactgtcttgtgttttcatgttgaaa

SEQ ID NO: 93251 - DNA, 40 bp, Homo sapiens
tttcaacatgaaaacacaagacagtggaattggaaacttt

SEQ ID NO: 93252 - DNA, 40 bp, Homo sapiens
aagtttccaattccactgtcttgtgttttcatgttgaaaa

SEQ ID NO: 93253 - DNA, 40 bp, Homo sapiens
ttttcaacatgaaaacacaagacagtggaattggaaactt

SEQ ID NO: 93254 - DNA, 40 bp, Homo sapiens
agtttccaattccactgtcttgtgttttcatgttgaaaat

SEQ ID NO: 93255 - DNA, 40 bp, Homo sapiens
attttcaacatgaaaacacaagacagtggaattggaaact

SEQ ID NO: 93256 - DNA, 40 bp, Homo sapiens
gtttccaattccactgtcttgtgttttcatgttgaaaata

SEQ ID NO: 93257 - DNA, 40 bp, Homo sapiens
tattttcaacatgaaaacacaagacagtggaattggaaac

SEQ ID NO: 93258 - DNA, 40 bp, Homo sapiens
tttccaattccactgtcttgtgttttcatgttgaaaatac

SEQ ID NO: 93259 - DNA, 40 bp, Homo sapiens
gtattttcaacatgaaaacacaagacagtggaattggaaa

SEQ ID NO: 93260 - DNA, 40 bp, Homo sapiens
ttccaattccactgtcttgtgttttcatgttgaaaatact

SEQ ID NO: 93261 - DNA, 40 bp, Homo sapiens
agtattttcaacatgaaaacacaagacagtggaattggaa

SEQ ID NO: 93262 - DNA, 40 bp, Homo sapiens
tccaattccactgtcttgtgttttcatgttgaaaatactt

SEQ ID NO: 93263 - DNA, 40 bp, Homo sapiens
aagtattttcaacatgaaaacacaagacagtggaattgga

SEQ ID NO: 93264 - DNA, 40 bp, Homo sapiens
ccaattccactgtcttgtgttttcatgttgaaaatacttt

SEQ ID NO: 93265 - DNA, 40 bp, Homo sapiens
aaagtattttcaacatgaaaacacaagacagtggaattgg

SEQ ID NO: 93266 - DNA, 40 bp, Homo sapiens
caattccactgtcttgtgttttcatgttgaaaatactttt

SEQ ID NO: 93267 - DNA, 40 bp, Homo sapiens
aaaagtattttcaacatgaaaacacaagacagtggaattg

SEQ ID NO: 93268 - DNA, 40 bp, Homo sapiens
aattccactgtcttgtgttttcatgttgaaaatacttttg

SEQ ID NO: 93269 - DNA, 40 bp, Homo sapiens
caaaagtattttcaacatgaaaacacaagacagtggaatt

SEQ ID NO: 93270 - DNA, 40 bp, Homo sapiens
attccactgtcttgtgttttcatgttgaaaatacttttgc

SEQ ID NO: 93271 - DNA, 40 bp, Homo sapiens
gcaaaagtattttcaacatgaaaacacaagacagtggaat

SEQ ID NO: 93272 - DNA, 40 bp, Homo sapiens
ttccactgtcttgtgttttcatgttgaaaatacttttgca

SEQ ID NO: 93273 - DNA, 40 bp, Homo sapiens
tgcaaaagtattttcaacatgaaaacacaagacagtggaa

SEQ ID NO: 93274 - DNA, 40 bp, Homo sapiens
tccactgtcttgtgttttcatgttgaaaatacttttgcat

SEQ ID NO: 93275 - DNA, 40 bp, Homo sapiens
atgcaaaagtattttcaacatgaaaacacaagacagtgga

SEQ ID NO: 93276 - DNA, 40 bp, Homo sapiens
ccactgtcttgtgttttcatgttgaaaatacttttgcatt

SEQ ID NO: 93277 - DNA, 40 bp, Homo sapiens
aatgcaaaagtattttcaacatgaaaacacaagacagtgg

SEQ ID NO: 93278 - DNA, 40 bp, Homo sapiens
cactgtcttgtgttttcatgttgaaaatacttttgcattt

SEQ ID NO: 93279 - DNA, 40 bp, Homo sapiens
aaatgcaaaagtattttcaacatgaaaacacaagacagtg

SEQ ID NO: 93280 - DNA, 40 bp, Homo sapiens
actgtcttgtgttttcatgttgaaaatacttttgcatttt

SEQ ID NO: 93281 - DNA, 40 bp, Homo sapiens
aaaatgcaaaagtattttcaacatgaaaacacaagacagt

SEQ ID NO: 93282 - DNA, 40 bp, Homo sapiens
ctgtcttgtgttttcatgttgaaaatacttttgcattttt

SEQ ID NO: 93283 - DNA, 40 bp, Homo sapiens
aaaaatgcaaaagtattttcaacatgaaaacacaagacag

SEQ ID NO: 93284 - DNA, 40 bp, Homo sapiens
tgtcttgtgttttcatgttgaaaatacttttgcatttttc

SEQ ID NO: 93285 - DNA, 40 bp, Homo sapiens
gaaaaatgcaaaagtattttcaacatgaaaacacaagaca

SEQ ID NO: 93286 - DNA, 40 bp, Homo sapiens
gtcttgtgttttcatgttgaaaatacttttgcatttttcc

SEQ ID NO: 93287 - DNA, 40 bp, Homo sapiens
ggaaaaatgcaaaagtattttcaacatgaaaacacaagac

SEQ ID NO: 93288 - DNA, 40 bp, Homo sapiens
tcttgtgttttcatgttgaaaatacttttgcatttttcct

SEQ ID NO: 93289 - DNA, 40 bp, Homo sapiens
aggaaaaatgcaaaagtattttcaacatgaaaacacaaga

SEQ ID NO: 93290 - DNA, 40 bp, Homo sapiens
cttgtgttttcatgttgaaaatacttttgcatttttcctt

SEQ ID NO: 93291 - DNA, 40 bp, Homo sapiens
aaggaaaaatgcaaaagtattttcaacatgaaaacacaag

SEQ ID NO: 93292 - DNA, 40 bp, Homo sapiens
ttgtgttttcatgttgaaaatacttttgcatttttccttt

SEQ ID NO: 93293 - DNA, 40 bp, Homo sapiens
aaaggaaaaatgcaaaagtattttcaacatgaaaacacaa

SEQ ID NO: 93294 - DNA, 40 bp, Homo sapiens
tgtgttttcatgttgaaaatacttttgcatttttcctttg

SEQ ID NO: 93295 - DNA, 40 bp, Homo sapiens
caaaggaaaaatgcaaaagtattttcaacatgaaaacaca

SEQ ID NO: 93296 - DNA, 40 bp, Homo sapiens
gtgttttcatgttgaaaatacttttgcatttttcctttga

SEQ ID NO: 93297 - DNA, 40 bp, Homo sapiens
tcaaaggaaaaatgcaaaagtattttcaacatgaaaacac

SEQ ID NO: 93298 - DNA, 40 bp, Homo sapiens
tgttttcatgttgaaaatacttttgcatttttcctttgag

SEQ ID NO: 93299 - DNA, 40 bp, Homo sapiens
ctcaaaggaaaaatgcaaaagtattttcaacatgaaaaca

SEQ ID NO: 93300 - DNA, 40 bp, Homo sapiens
gttttcatgttgaaaatacttttgcatttttcctttgagt

SEQ ID NO: 93301 - DNA, 40 bp, Homo sapiens
actcaaaggaaaaatgcaaaagtattttcaacatgaaaac

SEQ ID NO: 93302 - DNA, 40 bp, Homo sapiens
ttttcatgttgaaaatacttttgcatttttcctttgagtg

SEQ ID NO: 93303 - DNA, 40 bp, Homo sapiens
cactcaaaggaaaaatgcaaaagtattttcaacatgaaaa

SEQ ID NO: 93304 - DNA, 40 bp, Homo sapiens
tttcatgttgaaaatacttttgcatttttcctttgagtgc

SEQ ID NO: 93305 - DNA, 40 bp, Homo sapiens
gcactcaaaggaaaaatgcaaaagtattttcaacatgaaa

SEQ ID NO: 93306 - DNA, 40 bp, Homo sapiens
ttcatgttgaaaatacttttgcatttttcctttgagtgcc

SEQ ID NO: 93307 - DNA, 40 bp, Homo sapiens
ggcactcaaaggaaaaatgcaaaagtattttcaacatgaa

SEQ ID NO: 93308 - DNA, 40 bp, Homo sapiens
tcatgttgaaaatacttttgcatttttcctttgagtgcca

SEQ ID NO: 93309 - DNA, 40 bp, Homo sapiens
tggcactcaaaggaaaaatgcaaaagtattttcaacatga

SEQ ID NO: 93310 - DNA, 40 bp, Homo sapiens
catgttgaaaatacttttgcatttttcctttgagtgccaa

SEQ ID NO: 93311 - DNA, 40 bp, Homo sapiens
ttggcactcaaaggaaaaatgcaaaagtattttcaacatg

SEQ ID NO: 93312 - DNA, 40 bp, Homo sapiens
atgttgaaaatacttttgcatttttcctttgagtgccaat

SEQ ID NO: 93313 - DNA, 40 bp, Homo sapiens
attggcactcaaaggaaaaatgcaaaagtattttcaacat

SEQ ID NO: 93314 - DNA, 40 bp, Homo sapiens
tgttgaaaatacttttgcatttttcctttgagtgccaatt

SEQ ID NO: 93315 - DNA, 40 bp, Homo sapiens
aattggcactcaaaggaaaaatgcaaaagtattttcaaca

SEQ ID NO: 93316 - DNA, 40 bp, Homo sapiens
gttgaaaatacttttgcatttttcctttgagtgccaattt

SEQ ID NO: 93317 - DNA, 40 bp, Homo sapiens
aaattggcactcaaaggaaaaatgcaaaagtattttcaac

SEQ ID NO: 93318 - DNA, 40 bp, Homo sapiens
ttgaaaatacttttgcatttttcctttgagtgccaatttc

SEQ ID NO: 93319 - DNA, 40 bp, Homo sapiens
gaaattggcactcaaaggaaaaatgcaaaagtattttcaa

SEQ ID NO: 93320 - DNA, 40 bp, Homo sapiens
tgaaaatacttttgcatttttcctttgagtgccaatttct

SEQ ID NO: 93321 - DNA, 40 bp, Homo sapiens
agaaattggcactcaaaggaaaaatgcaaaagtattttca

SEQ ID NO: 93322 - DNA, 40 bp, Homo sapiens
gaaaatacttttgcatttttcctttgagtgccaatttctt

SEQ ID NO: 93323 - DNA, 40 bp, Homo sapiens
aagaaattggcactcaaaggaaaaatgcaaaagtattttc

SEQ ID NO: 93324 - DNA, 40 bp, Homo sapiens
aaaatacttttgcatttttcctttgagtgccaatttctta

SEQ ID NO: 93325 - DNA, 40 bp, Homo sapiens
taagaaattggcactcaaaggaaaaatgcaaaagtatttt

SEQ ID NO: 93326 - DNA, 40 bp, Homo sapiens
aaatacttttgcatttttcctttgagtgccaatttcttac

SEQ ID NO: 93327 - DNA, 40 bp, Homo sapiens
gtaagaaattggcactcaaaggaaaaatgcaaaagtattt

SEQ ID NO: 93328 - DNA, 40 bp, Homo sapiens
aatacttttgcatttttcctttgagtgccaatttcttact

SEQ ID NO: 93329 - DNA, 40 bp, Homo sapiens
agtaagaaattggcactcaaaggaaaaatgcaaaagtatt

SEQ ID NO: 93330 - DNA, 40 bp, Homo sapiens
atacttttgcatttttcctttgagtgccaatttcttacta

SEQ ID NO: 93331 - DNA, 40 bp, Homo sapiens
tagtaagaaattggcactcaaaggaaaaatgcaaaagtat

SEQ ID NO: 93332 - DNA, 40 bp, Homo sapiens
tacttttgcatttttcctttgagtgccaatttcttactag

SEQ ID NO: 93333 - DNA, 40 bp, Homo sapiens
ctagtaagaaattggcactcaaaggaaaaatgcaaaagta

SEQ ID NO: 93334 - DNA, 40 bp, Homo sapiens
acttttgcatttttcctttgagtgccaatttcttactagt

SEQ ID NO: 93335 - DNA, 40 bp, Homo sapiens
actagtaagaaattggcactcaaaggaaaaatgcaaaagt

SEQ ID NO: 93336 - DNA, 40 bp, Homo sapiens
cttttgcatttttcctttgagtgccaatttcttactagta

SEQ ID NO: 93337 - DNA, 40 bp, Homo sapiens
tactagtaagaaattggcactcaaaggaaaaatgcaaaag

SEQ ID NO: 93338 - DNA, 40 bp, Homo sapiens
ttttgcatttttcctttgagtgccaatttcttactagtac

SEQ ID NO: 93339 - DNA, 40 bp, Homo sapiens
gtactagtaagaaattggcactcaaaggaaaaatgcaaaa

SEQ ID NO: 93340 - DNA, 40 bp, Homo sapiens
tttgcatttttcctttgagtgccaatttcttactagtact

SEQ ID NO: 93341 - DNA, 40 bp, Homo sapiens
agtactagtaagaaattggcactcaaaggaaaaatgcaaa

SEQ ID NO: 93342 - DNA, 40 bp, Homo sapiens
ttgcatttttcctttgagtgccaatttcttactagtacta

SEQ ID NO: 93343 - DNA, 40 bp, Homo sapiens
tagtactagtaagaaattggcactcaaaggaaaaatgcaa

SEQ ID NO: 93344 - DNA, 40 bp, Homo sapiens
tgcatttttcctttgagtgccaatttcttactagtactat

SEQ ID NO: 93345 - DNA, 40 bp, Homo sapiens
atagtactagtaagaaattggcactcaaaggaaaaatgca

SEQ ID NO: 93346 - DNA, 40 bp, Homo sapiens
gcatttttcctttgagtgccaatttcttactagtactatt

SEQ ID NO: 93347 - DNA, 40 bp, Homo sapiens
aatagtactagtaagaaattggcactcaaaggaaaaatgc

SEQ ID NO: 93348 - DNA, 40 bp, Homo sapiens
catttttcctttgagtgccaatttcttactagtactattt

SEQ ID NO: 93349 - DNA, 40 bp, Homo sapiens
aaatagtactagtaagaaattggcactcaaaggaaaaatg

SEQ ID NO: 93350 - DNA, 40 bp, Homo sapiens
atttttcctttgagtgccaatttcttactagtactatttc

SEQ ID NO: 93351 - DNA, 40 bp, Homo sapiens
gaaatagtactagtaagaaattggcactcaaaggaaaaat

SEQ ID NO: 93352 - DNA, 40 bp, Homo sapiens
tttttcctttgagtgccaatttcttactagtactatttct

SEQ ID NO: 93353 - DNA, 40 bp, Homo sapiens
agaaatagtactagtaagaaattggcactcaaaggaaaaa

SEQ ID NO: 93354 - DNA, 40 bp, Homo sapiens
ttttcctttgagtgccaatttcttactagtactatttctt

SEQ ID NO: 93355 - DNA, 40 bp, Homo sapiens
aagaaatagtactagtaagaaattggcactcaaaggaaaa

SEQ ID NO: 93356 - DNA, 40 bp, Homo sapiens
tttcctttgagtgccaatttcttactagtactatttctta

SEQ ID NO: 93357 - DNA, 40 bp, Homo sapiens
taagaaatagtactagtaagaaattggcactcaaaggaaa

SEQ ID NO: 93358 - DNA, 40 bp, Homo sapiens
ttcctttgagtgccaatttcttactagtactatttcttaa

SEQ ID NO: 93359 - DNA, 40 bp, Homo sapiens
ttaagaaatagtactagtaagaaattggcactcaaaggaa

SEQ ID NO: 93360 - DNA, 40 bp, Homo sapiens
tcctttgagtgccaatttcttactagtactatttcttaat

SEQ ID NO: 93361 - DNA, 40 bp, Homo sapiens
attaagaaatagtactagtaagaaattggcactcaaagga

SEQ ID NO: 93362 - DNA, 40 bp, Homo sapiens
cctttgagtgccaatttcttactagtactatttcttaatg

SEQ ID NO: 93363 - DNA, 40 bp, Homo sapiens
cattaagaaatagtactagtaagaaattggcactcaaagg

SEQ ID NO: 93364 - DNA, 40 bp, Homo sapiens
ctttgagtgccaatttcttactagtactatttcttaatgt

SEQ ID NO: 93365 - DNA, 40 bp, Homo sapiens
acattaagaaatagtactagtaagaaattggcactcaaag

SEQ ID NO: 93366 - DNA, 40 bp, Homo sapiens
tttgagtgccaatttcttactagtactatttcttaatgta

SEQ ID NO: 93367 - DNA, 40 bp, Homo sapiens
tacattaagaaatagtactagtaagaaattggcactcaaa

SEQ ID NO: 93368 - DNA, 40 bp, Homo sapiens
ttgagtgccaatttcttactagtactatttcttaatgtaa

SEQ ID NO: 93369 - DNA, 40 bp, Homo sapiens
ttacattaagaaatagtactagtaagaaattggcactcaa

SEQ ID NO: 93370 - DNA, 40 bp, Homo sapiens
tgagtgccaatttcttactagtactatttcttaatgtaac

SEQ ID NO: 93371 - DNA, 40 bp, Homo sapiens
gttacattaagaaatagtactagtaagaaattggcactca

SEQ ID NO: 93372 - DNA, 40 bp, Homo sapiens
gagtgccaatttcttactagtactatttcttaatgtaaca

SEQ ID NO: 93373 - DNA, 40 bp, Homo sapiens
tgttacattaagaaatagtactagtaagaaattggcactc

SEQ ID NO: 93374 - DNA, 40 bp, Homo sapiens
agtgccaatttcttactagtactatttcttaatgtaacat

SEQ ID NO: 93375 - DNA, 40 bp, Homo sapiens
atgttacattaagaaatagtactagtaagaaattggcact

SEQ ID NO: 93376 - DNA, 40 bp, Homo sapiens
gtgccaatttcttactagtactatttcttaatgtaacatg

SEQ ID NO: 93377 - DNA, 40 bp, Homo sapiens
catgttacattaagaaatagtactagtaagaaattggcac

SEQ ID NO: 93378 - DNA, 40 bp, Homo sapiens
tgccaatttcttactagtactatttcttaatgtaacatgt

SEQ ID NO: 93379 - DNA, 40 bp, Homo sapiens
acatgttacattaagaaatagtactagtaagaaattggca

SEQ ID NO: 93380 - DNA, 40 bp, Homo sapiens
gccaatttcttactagtactatttcttaatgtaacatgtt

SEQ ID NO: 93381 - DNA, 40 bp, Homo sapiens
aacatgttacattaagaaatagtactagtaagaaattggc

SEQ ID NO: 93382 - DNA, 40 bp, Homo sapiens
ccaatttcttactagtactatttcttaatgtaacatgttt

SEQ ID NO: 93383 - DNA, 40 bp, Homo sapiens
aaacatgttacattaagaaatagtactagtaagaaattgg

SEQ ID NO: 93384 - DNA, 40 bp, Homo sapiens
caatttcttactagtactatttcttaatgtaacatgttta

SEQ ID NO: 93385 - DNA, 40 bp, Homo sapiens
taaacatgttacattaagaaatagtactagtaagaaattg

SEQ ID NO: 93386 - DNA, 40 bp, Homo sapiens
aatttcttactagtactatttcttaatgtaacatgtttac

SEQ ID NO: 93387 - DNA, 40 bp, Homo sapiens
gtaaacatgttacattaagaaatagtactagtaagaaatt

SEQ ID NO: 93388 - DNA, 40 bp, Homo sapiens
atttcttactagtactatttcttaatgtaacatgtttacc

SEQ ID NO: 93389 - DNA, 40 bp, Homo sapiens
ggtaaacatgttacattaagaaatagtactagtaagaaat

SEQ ID NO: 93390 - DNA, 40 bp, Homo sapiens
tttcttactagtactatttcttaatgtaacatgtttacct

SEQ ID NO: 93391 - DNA, 40 bp, Homo sapiens
aggtaaacatgttacattaagaaatagtactagtaagaaa

SEQ ID NO: 93392 - DNA, 40 bp, Homo sapiens
ttcttactagtactatttcttaatgtaacatgtttacctg

SEQ ID NO: 93393 - DNA, 40 bp, Homo sapiens
caggtaaacatgttacattaagaaatagtactagtaagaa

SEQ ID NO: 93394 - DNA, 40 bp, Homo sapiens
tcttactagtactatttcttaatgtaacatgtttacctgg

SEQ ID NO: 93395 - DNA, 40 bp, Homo sapiens
ccaggtaaacatgttacattaagaaatagtactagtaaga

SEQ ID NO: 93396 - DNA, 40 bp, Homo sapiens
cttactagtactatttcttaatgtaacatgtttacctgga

SEQ ID NO: 93397 - DNA, 40 bp, Homo sapiens
tccaggtaaacatgttacattaagaaatagtactagtaag

SEQ ID NO: 93398 - DNA, 40 bp, Homo sapiens
ttactagtactatttcttaatgtaacatgtttacctggaa

SEQ ID NO: 93399 - DNA, 40 bp, Homo sapiens
ttccaggtaaacatgttacattaagaaatagtactagtaa

SEQ ID NO: 93400 - DNA, 40 bp, Homo sapiens
tactagtactatttcttaatgtaacatgtttacctggaat

SEQ ID NO: 93401 - DNA, 40 bp, Homo sapiens
attccaggtaaacatgttacattaagaaatagtactagta

SEQ ID NO: 93402 - DNA, 40 bp, Homo sapiens
actagtactatttcttaatgtaacatgtttacctggaatg

SEQ ID NO: 93403 - DNA, 40 bp, Homo sapiens
cattccaggtaaacatgttacattaagaaatagtactagt

SEQ ID NO: 93404 - DNA, 40 bp, Homo sapiens
ctagtactatttcttaatgtaacatgtttacctggaatgt

SEQ ID NO: 93405 - DNA, 40 bp, Homo sapiens
acattccaggtaaacatgttacattaagaaatagtactag

SEQ ID NO: 93406 - DNA, 40 bp, Homo sapiens
tagtactatttcttaatgtaacatgtttacctggaatgta

SEQ ID NO: 93407 - DNA, 40 bp, Homo sapiens
tacattccaggtaaacatgttacattaagaaatagtacta

SEQ ID NO: 93408 - DNA, 40 bp, Homo sapiens
agtactatttcttaatgtaacatgtttacctggaatgtat

SEQ ID NO: 93409 - DNA, 40 bp, Homo sapiens
atacattccaggtaaacatgttacattaagaaatagtact

SEQ ID NO: 93410 - DNA, 40 bp, Homo sapiens
gtactatttcttaatgtaacatgtttacctggaatgtatt

SEQ ID NO: 93411 - DNA, 40 bp, Homo sapiens
aatacattccaggtaaacatgttacattaagaaatagtac

SEQ ID NO: 93412 - DNA, 40 bp, Homo sapiens
tactatttcttaatgtaacatgtttacctggaatgtattt

SEQ ID NO: 93413 - DNA, 40 bp, Homo sapiens
aaatacattccaggtaaacatgttacattaagaaatagta

SEQ ID NO: 93414 - DNA, 40 bp, Homo sapiens
actatttcttaatgtaacatgtttacctggaatgtatttt

SEQ ID NO: 93415 - DNA, 40 bp, Homo sapiens
aaaatacattccaggtaaacatgttacattaagaaatagt

SEQ ID NO: 93416 - DNA, 40 bp, Homo sapiens
ctatttcttaatgtaacatgtttacctggaatgtatttta

SEQ ID NO: 93417 - DNA, 40 bp, Homo sapiens
taaaatacattccaggtaaacatgttacattaagaaatag

SEQ ID NO: 93418 - DNA, 40 bp, Homo sapiens
tatttcttaatgtaacatgtttacctggaatgtattttaa

SEQ ID NO: 93419 - DNA, 40 bp, Homo sapiens
ttaaaatacattccaggtaaacatgttacattaagaaata

SEQ ID NO: 93420 - DNA, 40 bp, Homo sapiens
atttcttaatgtaacatgtttacctggaatgtattttaac

SEQ ID NO: 93421 - DNA, 40 bp, Homo sapiens
gttaaaatacattccaggtaaacatgttacattaagaaat

SEQ ID NO: 93422 - DNA, 40 bp, Homo sapiens
tttcttaatgtaacatgtttacctggaatgtattttaact

SEQ ID NO: 93423 - DNA, 40 bp, Homo sapiens
agttaaaatacattccaggtaaacatgttacattaagaaa

SEQ ID NO: 93424 - DNA, 40 bp, Homo sapiens
ttcttaatgtaacatgtttacctggaatgtattttaacta

SEQ ID NO: 93425 - DNA, 40 bp, Homo sapiens
tagttaaaatacattccaggtaaacatgttacattaagaa

SEQ ID NO: 93426 - DNA, 40 bp, Homo sapiens
tcttaatgtaacatgtttacctggaatgtattttaactat

SEQ ID NO: 93427 - DNA, 40 bp, Homo sapiens
atagttaaaatacattccaggtaaacatgttacattaaga

SEQ ID NO: 93428 - DNA, 40 bp, Homo sapiens
cttaatgtaacatgtttacctggaatgtattttaactatt

SEQ ID NO: 93429 - DNA, 40 bp, Homo sapiens
aatagttaaaatacattccaggtaaacatgttacattaag

SEQ ID NO: 93430 - DNA, 40 bp, Homo sapiens
ttaatgtaacatgtttacctggaatgtattttaactattt

SEQ ID NO: 93431 - DNA, 40 bp, Homo sapiens
aaatagttaaaatacattccaggtaaacatgttacattaa

SEQ ID NO: 93432 - DNA, 40 bp, Homo sapiens
taatgtaacatgtttacctggaatgtattttaactatttt

SEQ ID NO: 93433 - DNA, 40 bp, Homo sapiens
aaaatagttaaaatacattccaggtaaacatgttacatta

SEQ ID NO: 93434 - DNA, 40 bp, Homo sapiens
aatgtaacatgtttacctggaatgtattttaactattttt

SEQ ID NO: 93435 - DNA, 40 bp, Homo sapiens
aaaaatagttaaaatacattccaggtaaacatgttacatt

SEQ ID NO: 93436 - DNA, 40 bp, Homo sapiens
atgtaacatgtttacctggaatgtattttaactatttttg

SEQ ID NO: 93437 - DNA, 40 bp, Homo sapiens
caaaaatagttaaaatacattccaggtaaacatgttacat

SEQ ID NO: 93438 - DNA, 40 bp, Homo sapiens
tgtaacatgtttacctggaatgtattttaactatttttgt

SEQ ID NO: 93439 - DNA, 40 bp, Homo sapiens
acaaaaatagttaaaatacattccaggtaaacatgttaca

SEQ ID NO: 93440 - DNA, 40 bp, Homo sapiens
gtaacatgtttacctggaatgtattttaactatttttgta

SEQ ID NO: 93441 - DNA, 40 bp, Homo sapiens
tacaaaaatagttaaaatacattccaggtaaacatgttac

SEQ ID NO: 93442 - DNA, 40 bp, Homo sapiens
taacatgtttacctggaatgtattttaactatttttgtat

SEQ ID NO: 93443 - DNA, 40 bp, Homo sapiens
atacaaaaatagttaaaatacattccaggtaaacatgtta

SEQ ID NO: 93444 - DNA, 40 bp, Homo sapiens
aacatgtttacctggaatgtattttaactatttttgtata

SEQ ID NO: 93445 - DNA, 40 bp, Homo sapiens
tatacaaaaatagttaaaatacattccaggtaaacatgtt

SEQ ID NO: 93446 - DNA, 40 bp, Homo sapiens
acatgtttacctggaatgtattttaactatttttgtatag

SEQ ID NO: 93447 - DNA, 40 bp, Homo sapiens
ctatacaaaaatagttaaaatacattccaggtaaacatgt

SEQ ID NO: 93448 - DNA, 40 bp, Homo sapiens
catgtttacctggaatgtattttaactatttttgtatagt

SEQ ID NO: 93449 - DNA, 40 bp, Homo sapiens
actatacaaaaatagttaaaatacattccaggtaaacatg

SEQ ID NO: 93450 - DNA, 40 bp, Homo sapiens
atgtttacctggaatgtattttaactatttttgtatagtg

SEQ ID NO: 93451 - DNA, 40 bp, Homo sapiens
cactatacaaaaatagttaaaatacattccaggtaaacat

SEQ ID NO: 93452 - DNA, 40 bp, Homo sapiens
tgtttacctggaatgtattttaactatttttgtatagtgt

SEQ ID NO: 93453 - DNA, 40 bp, Homo sapiens
acactatacaaaaatagttaaaatacattccaggtaaaca

SEQ ID NO: 93454 - DNA, 40 bp, Homo sapiens
gtttacctggaatgtattttaactatttttgtatagtgta

SEQ ID NO: 93455 - DNA, 40 bp, Homo sapiens
tacactatacaaaaatagttaaaatacattccaggtaaac

SEQ ID NO: 93456 - DNA, 40 bp, Homo sapiens
tttacctggaatgtattttaactatttttgtatagtgtaa

SEQ ID NO: 93457 - DNA, 40 bp, Homo sapiens
ttacactatacaaaaatagttaaaatacattccaggtaaa

SEQ ID NO: 93458 - DNA, 40 bp, Homo sapiens
ttacctggaatgtattttaactatttttgtatagtgtaaa

SEQ ID NO: 93459 - DNA, 40 bp, Homo sapiens
tttacactatacaaaaatagttaaaatacattccaggtaa

SEQ ID NO: 93460 - DNA, 40 bp, Homo sapiens
tacctggaatgtattttaactatttttgtatagtgtaaac

SEQ ID NO: 93461 - DNA, 40 bp, Homo sapiens
gtttacactatacaaaaatagttaaaatacattccaggta

SEQ ID NO: 93462 - DNA, 40 bp, Homo sapiens
acctggaatgtattttaactatttttgtatagtgtaaact

SEQ ID NO: 93463 - DNA, 40 bp, Homo sapiens
agtttacactatacaaaaatagttaaaatacattccaggt

SEQ ID NO: 93464 - DNA, 40 bp, Homo sapiens
cctggaatgtattttaactatttttgtatagtgtaaactg

SEQ ID NO: 93465 - DNA, 40 bp, Homo sapiens
cagtttacactatacaaaaatagttaaaatacattccagg

SEQ ID NO: 93466 - DNA, 40 bp, Homo sapiens
ctggaatgtattttaactatttttgtatagtgtaaactga

SEQ ID NO: 93467 - DNA, 40 bp, Homo sapiens
tcagtttacactatacaaaaatagttaaaatacattccag

SEQ ID NO: 93468 - DNA, 40 bp, Homo sapiens
tggaatgtattttaactatttttgtatagtgtaaactgaa

SEQ ID NO: 93469 - DNA, 40 bp, Homo sapiens
ttcagtttacactatacaaaaatagttaaaatacattcca

SEQ ID NO: 93470 - DNA, 40 bp, Homo sapiens
ggaatgtattttaactatttttgtatagtgtaaactgaaa

SEQ ID NO: 93471 - DNA, 40 bp, Homo sapiens
tttcagtttacactatacaaaaatagttaaaatacattcc

SEQ ID NO: 93472 - DNA, 40 bp, Homo sapiens
gaatgtattttaactatttttgtatagtgtaaactgaaac

SEQ ID NO: 93473 - DNA, 40 bp, Homo sapiens
gtttcagtttacactatacaaaaatagttaaaatacattc

SEQ ID NO: 93474 - DNA, 40 bp, Homo sapiens
aatgtattttaactatttttgtatagtgtaaactgaaaca

SEQ ID NO: 93475 - DNA, 40 bp, Homo sapiens
tgtttcagtttacactatacaaaaatagttaaaatacatt

SEQ ID NO: 93476 - DNA, 40 bp, Homo sapiens
atgtattttaactatttttgtatagtgtaaactgaaacat

SEQ ID NO: 93477 - DNA, 40 bp, Homo sapiens
atgtttcagtttacactatacaaaaatagttaaaatacat

SEQ ID NO: 93478 - DNA, 40 bp, Homo sapiens
tgtattttaactatttttgtatagtgtaaactgaaacatg

SEQ ID NO: 93479 - DNA, 40 bp, Homo sapiens
catgtttcagtttacactatacaaaaatagttaaaataca

SEQ ID NO: 93480 - DNA, 40 bp, Homo sapiens
gtattttaactatttttgtatagtgtaaactgaaacatgc

SEQ ID NO: 93481 - DNA, 40 bp, Homo sapiens
gcatgtttcagtttacactatacaaaaatagttaaaatac

SEQ ID NO: 93482 - DNA, 40 bp, Homo sapiens
tattttaactatttttgtatagtgtaaactgaaacatgca

SEQ ID NO: 93483 - DNA, 40 bp, Homo sapiens
tgcatgtttcagtttacactatacaaaaatagttaaaata

SEQ ID NO: 93484 - DNA, 40 bp, Homo sapiens
attttaactatttttgtatagtgtaaactgaaacatgcac

SEQ ID NO: 93485 - DNA, 40 bp, Homo sapiens
gtgcatgtttcagtttacactatacaaaaatagttaaaat

SEQ ID NO: 93486 - DNA, 40 bp, Homo sapiens
ttttaactatttttgtatagtgtaaactgaaacatgcaca

SEQ ID NO: 93487 - DNA, 40 bp, Homo sapiens
tgtgcatgtttcagtttacactatacaaaaatagttaaaa

SEQ ID NO: 93488 - DNA, 40 bp, Homo sapiens
tttaactatttttgtatagtgtaaactgaaacatgcacat

SEQ ID NO: 93489 - DNA, 40 bp, Homo sapiens
atgtgcatgtttcagtttacactatacaaaaatagttaaa

SEQ ID NO: 93490 - DNA, 40 bp, Homo sapiens
ttaactatttttgtatagtgtaaactgaaacatgcacatt

SEQ ID NO: 93491 - DNA, 40 bp, Homo sapiens
aatgtgcatgtttcagtttacactatacaaaaatagttaa

SEQ ID NO: 93492 - DNA, 40 bp, Homo sapiens
taactatttttgtatagtgtaaactgaaacatgcacattt

SEQ ID NO: 93493 - DNA, 40 bp, Homo sapiens
aaatgtgcatgtttcagtttacactatacaaaaatagtta

SEQ ID NO: 93494 - DNA, 40 bp, Homo sapiens
aactatttttgtatagtgtaaactgaaacatgcacatttt

SEQ ID NO: 93495 - DNA, 40 bp, Homo sapiens
aaaatgtgcatgtttcagtttacactatacaaaaatagtt

SEQ ID NO: 93496 - DNA, 40 bp, Homo sapiens
actatttttgtatagtgtaaactgaaacatgcacattttg

SEQ ID NO: 93497 - DNA, 40 bp, Homo sapiens
caaaatgtgcatgtttcagtttacactatacaaaaatagt

SEQ ID NO: 93498 - DNA, 40 bp, Homo sapiens
ctatttttgtatagtgtaaactgaaacatgcacattttgt

SEQ ID NO: 93499 - DNA, 40 bp, Homo sapiens
acaaaatgtgcatgtttcagtttacactatacaaaaatag

SEQ ID NO: 93500 - DNA, 40 bp, Homo sapiens
tatttttgtatagtgtaaactgaaacatgcacattttgta

SEQ ID NO: 93501 - DNA, 40 bp, Homo sapiens
tacaaaatgtgcatgtttcagtttacactatacaaaaata

SEQ ID NO: 93502 - DNA, 40 bp, Homo sapiens
atttttgtatagtgtaaactgaaacatgcacattttgtac

SEQ ID NO: 93503 - DNA, 40 bp, Homo sapiens
gtacaaaatgtgcatgtttcagtttacactatacaaaaat

SEQ ID NO: 93504 - DNA, 40 bp, Homo sapiens
tttttgtatagtgtaaactgaaacatgcacattttgtaca

SEQ ID NO: 93505 - DNA, 40 bp, Homo sapiens
tgtacaaaatgtgcatgtttcagtttacactatacaaaaa

SEQ ID NO: 93506 - DNA, 40 bp, Homo sapiens
ttttgtatagtgtaaactgaaacatgcacattttgtacat

SEQ ID NO: 93507 - DNA, 40 bp, Homo sapiens
atgtacaaaatgtgcatgtttcagtttacactatacaaaa

SEQ ID NO: 93508 - DNA, 40 bp, Homo sapiens
tttgtatagtgtaaactgaaacatgcacattttgtacatt

SEQ ID NO: 93509 - DNA, 40 bp, Homo sapiens
aatgtacaaaatgtgcatgtttcagtttacactatacaaa

SEQ ID NO: 93510 - DNA, 40 bp, Homo sapiens
ttgtatagtgtaaactgaaacatgcacattttgtacattg

SEQ ID NO: 93511 - DNA, 40 bp, Homo sapiens
caatgtacaaaatgtgcatgtttcagtttacactatacaa

SEQ ID NO: 93512 - DNA, 40 bp, Homo sapiens
tgtatagtgtaaactgaaacatgcacattttgtacattgt

SEQ ID NO: 93513 - DNA, 40 bp, Homo sapiens
acaatgtacaaaatgtgcatgtttcagtttacactataca

SEQ ID NO: 93514 - DNA, 40 bp, Homo sapiens
gtatagtgtaaactgaaacatgcacattttgtacattgtg

SEQ ID NO: 93515 - DNA, 40 bp, Homo sapiens
cacaatgtacaaaatgtgcatgtttcagtttacactatac

SEQ ID NO: 93516 - DNA, 40 bp, Homo sapiens
tatagtgtaaactgaaacatgcacattttgtacattgtgc

SEQ ID NO: 93517 - DNA, 40 bp, Homo sapiens
gcacaatgtacaaaatgtgcatgtttcagtttacactata

SEQ ID NO: 93518 - DNA, 40 bp, Homo sapiens
atagtgtaaactgaaacatgcacattttgtacattgtgct

SEQ ID NO: 93519 - DNA, 40 bp, Homo sapiens
agcacaatgtacaaaatgtgcatgtttcagtttacactat

SEQ ID NO: 93520 - DNA, 40 bp, Homo sapiens
tagtgtaaactgaaacatgcacattttgtacattgtgctt

SEQ ID NO: 93521 - DNA, 40 bp, Homo sapiens
aagcacaatgtacaaaatgtgcatgtttcagtttacacta

SEQ ID NO: 93522 - DNA, 40 bp, Homo sapiens
agtgtaaactgaaacatgcacattttgtacattgtgcttt

SEQ ID NO: 93523 - DNA, 40 bp, Homo sapiens
aaagcacaatgtacaaaatgtgcatgtttcagtttacact

SEQ ID NO: 93524 - DNA, 40 bp, Homo sapiens
gtgtaaactgaaacatgcacattttgtacattgtgctttc

SEQ ID NO: 93525 - DNA, 40 bp, Homo sapiens
gaaagcacaatgtacaaaatgtgcatgtttcagtttacac

SEQ ID NO: 93526 - DNA, 40 bp, Homo sapiens
tgtaaactgaaacatgcacattttgtacattgtgctttct

SEQ ID NO: 93527 - DNA, 40 bp, Homo sapiens
agaaagcacaatgtacaaaatgtgcatgtttcagtttaca

SEQ ID NO: 93528 - DNA, 40 bp, Homo sapiens
gtaaactgaaacatgcacattttgtacattgtgctttctt

SEQ ID NO: 93529 - DNA, 40 bp, Homo sapiens
aagaaagcacaatgtacaaaatgtgcatgtttcagtttac

SEQ ID NO: 93530 - DNA, 40 bp, Homo sapiens
taaactgaaacatgcacattttgtacattgtgctttcttt

SEQ ID NO: 93531 - DNA, 40 bp, Homo sapiens
aaagaaagcacaatgtacaaaatgtgcatgtttcagttta

SEQ ID NO: 93532 - DNA, 40 bp, Homo sapiens
aaactgaaacatgcacattttgtacattgtgctttctttt

SEQ ID NO: 93533 - DNA, 40 bp, Homo sapiens
aaaagaaagcacaatgtacaaaatgtgcatgtttcagttt

SEQ ID NO: 93534 - DNA, 40 bp, Homo sapiens
aactgaaacatgcacattttgtacattgtgctttcttttg

SEQ ID NO: 93535 - DNA, 40 bp, Homo sapiens
caaaagaaagcacaatgtacaaaatgtgcatgtttcagtt

SEQ ID NO: 93536 - DNA, 40 bp, Homo sapiens
actgaaacatgcacattttgtacattgtgctttcttttgt

SEQ ID NO: 93537 - DNA, 40 bp, Homo sapiens
acaaaagaaagcacaatgtacaaaatgtgcatgtttcagt

SEQ ID NO: 93538 - DNA, 40 bp, Homo sapiens
ctgaaacatgcacattttgtacattgtgctttcttttgtg

SEQ ID NO: 93539 - DNA, 40 bp, Homo sapiens
cacaaaagaaagcacaatgtacaaaatgtgcatgtttcag

SEQ ID NO: 93540 - DNA, 40 bp, Homo sapiens
tgaaacatgcacattttgtacattgtgctttcttttgtgg

SEQ ID NO: 93541 - DNA, 40 bp, Homo sapiens
ccacaaaagaaagcacaatgtacaaaatgtgcatgtttca

SEQ ID NO: 93542 - DNA, 40 bp, Homo sapiens
gaaacatgcacattttgtacattgtgctttcttttgtggg

SEQ ID NO: 93543 - DNA, 40 bp, Homo sapiens
cccacaaaagaaagcacaatgtacaaaatgtgcatgtttc

SEQ ID NO: 93544 - DNA, 40 bp, Homo sapiens
aaacatgcacattttgtacattgtgctttcttttgtggga

SEQ ID NO: 93545 - DNA, 40 bp, Homo sapiens
tcccacaaaagaaagcacaatgtacaaaatgtgcatgttt

SEQ ID NO: 93546 - DNA, 40 bp, Homo sapiens
aacatgcacattttgtacattgtgctttcttttgtgggac

SEQ ID NO: 93547 - DNA, 40 bp, Homo sapiens
gtcccacaaaagaaagcacaatgtacaaaatgtgcatgtt

SEQ ID NO: 93548 - DNA, 40 bp, Homo sapiens
acatgcacattttgtacattgtgctttcttttgtgggaca

SEQ ID NO: 93549 - DNA, 40 bp, Homo sapiens
tgtcccacaaaagaaagcacaatgtacaaaatgtgcatgt

SEQ ID NO: 93550 - DNA, 40 bp, Homo sapiens
catgcacattttgtacattgtgctttcttttgtgggacat

SEQ ID NO: 93551 - DNA, 40 bp, Homo sapiens
atgtcccacaaaagaaagcacaatgtacaaaatgtgcatg

SEQ ID NO: 93552 - DNA, 40 bp, Homo sapiens
atgcacattttgtacattgtgctttcttttgtgggacata

SEQ ID NO: 93553 - DNA, 40 bp, Homo sapiens
tatgtcccacaaaagaaagcacaatgtacaaaatgtgcat

SEQ ID NO: 93554 - DNA, 40 bp, Homo sapiens
tgcacattttgtacattgtgctttcttttgtgggacatat

SEQ ID NO: 93555 - DNA, 40 bp, Homo sapiens
atatgtcccacaaaagaaagcacaatgtacaaaatgtgca

SEQ ID NO: 93556 - DNA, 40 bp, Homo sapiens
gcacattttgtacattgtgctttcttttgtgggacatatg

SEQ ID NO: 93557 - DNA, 40 bp, Homo sapiens
catatgtcccacaaaagaaagcacaatgtacaaaatgtgc

SEQ ID NO: 93558 - DNA, 40 bp, Homo sapiens
cacattttgtacattgtgctttcttttgtgggacatatgc

SEQ ID NO: 93559 - DNA, 40 bp, Homo sapiens
gcatatgtcccacaaaagaaagcacaatgtacaaaatgtg

SEQ ID NO: 93560 - DNA, 40 bp, Homo sapiens
acattttgtacattgtgctttcttttgtgggacatatgca

SEQ ID NO: 93561 - DNA, 40 bp, Homo sapiens
tgcatatgtcccacaaaagaaagcacaatgtacaaaatgt

SEQ ID NO: 93562 - DNA, 40 bp, Homo sapiens
cattttgtacattgtgctttcttttgtgggacatatgcag

SEQ ID NO: 93563 - DNA, 40 bp, Homo sapiens
ctgcatatgtcccacaaaagaaagcacaatgtacaaaatg

SEQ ID NO: 93564 - DNA, 40 bp, Homo sapiens
attttgtacattgtgctttcttttgtgggacatatgcagt

SEQ ID NO: 93565 - DNA, 40 bp, Homo sapiens
actgcatatgtcccacaaaagaaagcacaatgtacaaaat

SEQ ID NO: 93566 - DNA, 40 bp, Homo sapiens
ttttgtacattgtgctttcttttgtgggacatatgcagtg

SEQ ID NO: 93567 - DNA, 40 bp, Homo sapiens
cactgcatatgtcccacaaaagaaagcacaatgtacaaaa

SEQ ID NO: 93568 - DNA, 40 bp, Homo sapiens
tttgtacattgtgctttcttttgtgggacatatgcagtgt

SEQ ID NO: 93569 - DNA, 40 bp, Homo sapiens
acactgcatatgtcccacaaaagaaagcacaatgtacaaa

SEQ ID NO: 93570 - DNA, 40 bp, Homo sapiens
ttgtacattgtgctttcttttgtgggacatatgcagtgtg

SEQ ID NO: 93571 - DNA, 40 bp, Homo sapiens
cacactgcatatgtcccacaaaagaaagcacaatgtacaa

SEQ ID NO: 93572 - DNA, 40 bp, Homo sapiens
tgtacattgtgctttcttttgtgggacatatgcagtgtga

SEQ ID NO: 93573 - DNA, 40 bp, Homo sapiens
tcacactgcatatgtcccacaaaagaaagcacaatgtaca

SEQ ID NO: 93574 - DNA, 40 bp, Homo sapiens
gtacattgtgctttcttttgtgggacatatgcagtgtgat

SEQ ID NO: 93575 - DNA, 40 bp, Homo sapiens
atcacactgcatatgtcccacaaaagaaagcacaatgtac

SEQ ID NO: 93576 - DNA, 40 bp, Homo sapiens
tacattgtgctttcttttgtgggacatatgcagtgtgatc

SEQ ID NO: 93577 - DNA, 40 bp, Homo sapiens
gatcacactgcatatgtcccacaaaagaaagcacaatgta

SEQ ID NO: 93578 - DNA, 40 bp, Homo sapiens
acattgtgctttcttttgtgggacatatgcagtgtgatcc

SEQ ID NO: 93579 - DNA, 40 bp, Homo sapiens
ggatcacactgcatatgtcccacaaaagaaagcacaatgt

SEQ ID NO: 93580 - DNA, 40 bp, Homo sapiens
cattgtgctttcttttgtgggacatatgcagtgtgatcca

SEQ ID NO: 93581 - DNA, 40 bp, Homo sapiens
tggatcacactgcatatgtcccacaaaagaaagcacaatg

SEQ ID NO: 93582 - DNA, 40 bp, Homo sapiens
attgtgctttcttttgtgggacatatgcagtgtgatccag

SEQ ID NO: 93583 - DNA, 40 bp, Homo sapiens
ctggatcacactgcatatgtcccacaaaagaaagcacaat

SEQ ID NO: 93584 - DNA, 40 bp, Homo sapiens
ttgtgctttcttttgtgggacatatgcagtgtgatccagt

SEQ ID NO: 93585 - DNA, 40 bp, Homo sapiens
actggatcacactgcatatgtcccacaaaagaaagcacaa

SEQ ID NO: 93586 - DNA, 40 bp, Homo sapiens
tgtgctttcttttgtgggacatatgcagtgtgatccagtt

SEQ ID NO: 93587 - DNA, 40 bp, Homo sapiens
aactggatcacactgcatatgtcccacaaaagaaagcaca

SEQ ID NO: 93588 - DNA, 40 bp, Homo sapiens
gtgctttcttttgtgggacatatgcagtgtgatccagttg

SEQ ID NO: 93589 - DNA, 40 bp, Homo sapiens
caactggatcacactgcatatgtcccacaaaagaaagcac

SEQ ID NO: 93590 - DNA, 40 bp, Homo sapiens
tgctttcttttgtgggacatatgcagtgtgatccagttgt

SEQ ID NO: 93591 - DNA, 40 bp, Homo sapiens
acaactggatcacactgcatatgtcccacaaaagaaagca

SEQ ID NO: 93592 - DNA, 40 bp, Homo sapiens
gctttcttttgtgggacatatgcagtgtgatccagttgtt

SEQ ID NO: 93593 - DNA, 40 bp, Homo sapiens
aacaactggatcacactgcatatgtcccacaaaagaaagc

SEQ ID NO: 93594 - DNA, 40 bp, Homo sapiens
ctttcttttgtgggacatatgcagtgtgatccagttgttt

SEQ ID NO: 93595 - DNA, 40 bp, Homo sapiens
aaacaactggatcacactgcatatgtcccacaaaagaaag

SEQ ID NO: 93596 - DNA, 40 bp, Homo sapiens
tttcttttgtgggacatatgcagtgtgatccagttgtttt

SEQ ID NO: 93597 - DNA, 40 bp, Homo sapiens
aaaacaactggatcacactgcatatgtcccacaaaagaaa

SEQ ID NO: 93598 - DNA, 40 bp, Homo sapiens
ttcttttgtgggacatatgcagtgtgatccagttgttttc

SEQ ID NO: 93599 - DNA, 40 bp, Homo sapiens
gaaaacaactggatcacactgcatatgtcccacaaaagaa

SEQ ID NO: 93600 - DNA, 40 bp, Homo sapiens
tcttttgtgggacatatgcagtgtgatccagttgttttcc

SEQ ID NO: 93601 - DNA, 40 bp, Homo sapiens
ggaaaacaactggatcacactgcatatgtcccacaaaaga

SEQ ID NO: 93602 - DNA, 40 bp, Homo sapiens
cttttgtgggacatatgcagtgtgatccagttgttttcca

SEQ ID NO: 93603 - DNA, 40 bp, Homo sapiens
tggaaaacaactggatcacactgcatatgtcccacaaaag

SEQ ID NO: 93604 - DNA, 40 bp, Homo sapiens
ttttgtgggacatatgcagtgtgatccagttgttttccat

SEQ ID NO: 93605 - DNA, 40 bp, Homo sapiens
atggaaaacaactggatcacactgcatatgtcccacaaaa

SEQ ID NO: 93606 - DNA, 40 bp, Homo sapiens
tttgtgggacatatgcagtgtgatccagttgttttccatc

SEQ ID NO: 93607 - DNA, 40 bp, Homo sapiens
gatggaaaacaactggatcacactgcatatgtcccacaaa

SEQ ID NO: 93608 - DNA, 40 bp, Homo sapiens
ttgtgggacatatgcagtgtgatccagttgttttccatca

SEQ ID NO: 93609 - DNA, 40 bp, Homo sapiens
tgatggaaaacaactggatcacactgcatatgtcccacaa

SEQ ID NO: 93610 - DNA, 40 bp, Homo sapiens
tgtgggacatatgcagtgtgatccagttgttttccatcat

SEQ ID NO: 93611 - DNA, 40 bp, Homo sapiens
atgatggaaaacaactggatcacactgcatatgtcccaca

SEQ ID NO: 93612 - DNA, 40 bp, Homo sapiens
gtgggacatatgcagtgtgatccagttgttttccatcatt

SEQ ID NO: 93613 - DNA, 40 bp, Homo sapiens
aatgatggaaaacaactggatcacactgcatatgtcccac

SEQ ID NO: 93614 - DNA, 40 bp, Homo sapiens
tgggacatatgcagtgtgatccagttgttttccatcattt

SEQ ID NO: 93615 - DNA, 40 bp, Homo sapiens
aaatgatggaaaacaactggatcacactgcatatgtccca

SEQ ID NO: 93616 - DNA, 40 bp, Homo sapiens
gggacatatgcagtgtgatccagttgttttccatcatttg

SEQ ID NO: 93617 - DNA, 40 bp, Homo sapiens
caaatgatggaaaacaactggatcacactgcatatgtccc

SEQ ID NO: 93618 - DNA, 40 bp, Homo sapiens
ggacatatgcagtgtgatccagttgttttccatcatttgg

SEQ ID NO: 93619 - DNA, 40 bp, Homo sapiens
ccaaatgatggaaaacaactggatcacactgcatatgtcc

SEQ ID NO: 93620 - DNA, 40 bp, Homo sapiens
gacatatgcagtgtgatccagttgttttccatcatttggt

SEQ ID NO: 93621 - DNA, 40 bp, Homo sapiens
accaaatgatggaaaacaactggatcacactgcatatgtc

SEQ ID NO: 93622 - DNA, 40 bp, Homo sapiens
acatatgcagtgtgatccagttgttttccatcatttggtt

SEQ ID NO: 93623 - DNA, 40 bp, Homo sapiens
aaccaaatgatggaaaacaactggatcacactgcatatgt

SEQ ID NO: 93624 - DNA, 40 bp, Homo sapiens
catatgcagtgtgatccagttgttttccatcatttggttg

SEQ ID NO: 93625 - DNA, 40 bp, Homo sapiens
caaccaaatgatggaaaacaactggatcacactgcatatg

SEQ ID NO: 93626 - DNA, 40 bp, Homo sapiens
atatgcagtgtgatccagttgttttccatcatttggttgc

SEQ ID NO: 93627 - DNA, 40 bp, Homo sapiens
gcaaccaaatgatggaaaacaactggatcacactgcatat

SEQ ID NO: 93628 - DNA, 40 bp, Homo sapiens
tatgcagtgtgatccagttgttttccatcatttggttgcg

SEQ ID NO: 93629 - DNA, 40 bp, Homo sapiens
cgcaaccaaatgatggaaaacaactggatcacactgcata

SEQ ID NO: 93630 - DNA, 40 bp, Homo sapiens
atgcagtgtgatccagttgttttccatcatttggttgcgc

SEQ ID NO: 93631 - DNA, 40 bp, Homo sapiens
gcgcaaccaaatgatggaaaacaactggatcacactgcat

SEQ ID NO: 93632 - DNA, 40 bp, Homo sapiens
tgcagtgtgatccagttgttttccatcatttggttgcgct

SEQ ID NO: 93633 - DNA, 40 bp, Homo sapiens
agcgcaaccaaatgatggaaaacaactggatcacactgca

SEQ ID NO: 93634 - DNA, 40 bp, Homo sapiens
gcagtgtgatccagttgttttccatcatttggttgcgctg

SEQ ID NO: 93635 - DNA, 40 bp, Homo sapiens
cagcgcaaccaaatgatggaaaacaactggatcacactgc

SEQ ID NO: 93636 - DNA, 40 bp, Homo sapiens
cagtgtgatccagttgttttccatcatttggttgcgctga

SEQ ID NO: 93637 - DNA, 40 bp, Homo sapiens
tcagcgcaaccaaatgatggaaaacaactggatcacactg

SEQ ID NO: 93638 - DNA, 40 bp, Homo sapiens
agtgtgatccagttgttttccatcatttggttgcgctgac

SEQ ID NO: 93639 - DNA, 40 bp, Homo sapiens
gtcagcgcaaccaaatgatggaaaacaactggatcacact

SEQ ID NO: 93640 - DNA, 40 bp, Homo sapiens
gtgtgatccagttgttttccatcatttggttgcgctgacc

SEQ ID NO: 93641 - DNA, 40 bp, Homo sapiens
ggtcagcgcaaccaaatgatggaaaacaactggatcacac

SEQ ID NO: 93642 - DNA, 40 bp, Homo sapiens
tgtgatccagttgttttccatcatttggttgcgctgacct

SEQ ID NO: 93643 - DNA, 40 bp, Homo sapiens
aggtcagcgcaaccaaatgatggaaaacaactggatcaca

SEQ ID NO: 93644 - DNA, 40 bp, Homo sapiens
gtgatccagttgttttccatcatttggttgcgctgaccta

SEQ ID NO: 93645 - DNA, 40 bp, Homo sapiens
taggtcagcgcaaccaaatgatggaaaacaactggatcac

SEQ ID NO: 93646 - DNA, 40 bp, Homo sapiens
tgatccagttgttttccatcatttggttgcgctgacctag

SEQ ID NO: 93647 - DNA, 40 bp, Homo sapiens
ctaggtcagcgcaaccaaatgatggaaaacaactggatca

SEQ ID NO: 93648 - DNA, 40 bp, Homo sapiens
gatccagttgttttccatcatttggttgcgctgacctagg

SEQ ID NO: 93649 - DNA, 40 bp, Homo sapiens
cctaggtcagcgcaaccaaatgatggaaaacaactggatc

SEQ ID NO: 93650 - DNA, 40 bp, Homo sapiens
atccagttgttttccatcatttggttgcgctgacctagga

SEQ ID NO: 93651 - DNA, 40 bp, Homo sapiens
tcctaggtcagcgcaaccaaatgatggaaaacaactggat

SEQ ID NO: 93652 - DNA, 40 bp, Homo sapiens
tccagttgttttccatcatttggttgcgctgacctaggaa

SEQ ID NO: 93653 - DNA, 40 bp, Homo sapiens
ttcctaggtcagcgcaaccaaatgatggaaaacaactgga

SEQ ID NO: 93654 - DNA, 40 bp, Homo sapiens
ccagttgttttccatcatttggttgcgctgacctaggaat

SEQ ID NO: 93655 - DNA, 40 bp, Homo sapiens
attcctaggtcagcgcaaccaaatgatggaaaacaactgg

SEQ ID NO: 93656 - DNA, 40 bp, Homo sapiens
cagttgttttccatcatttggttgcgctgacctaggaatg

SEQ ID NO: 93657 - DNA, 40 bp, Homo sapiens
cattcctaggtcagcgcaaccaaatgatggaaaacaactg

SEQ ID NO: 93658 - DNA, 40 bp, Homo sapiens
agttgttttccatcatttggttgcgctgacctaggaatgt

SEQ ID NO: 93659 - DNA, 40 bp, Homo sapiens
acattcctaggtcagcgcaaccaaatgatggaaaacaact

SEQ ID NO: 93660 - DNA, 40 bp, Homo sapiens
gttgttttccatcatttggttgcgctgacctaggaatgtt

SEQ ID NO: 93661 - DNA, 40 bp, Homo sapiens
aacattcctaggtcagcgcaaccaaatgatggaaaacaac

SEQ ID NO: 93662 - DNA, 40 bp, Homo sapiens
ttgttttccatcatttggttgcgctgacctaggaatgttg

SEQ ID NO: 93663 - DNA, 40 bp, Homo sapiens
caacattcctaggtcagcgcaaccaaatgatggaaaacaa

SEQ ID NO: 93664 - DNA, 40 bp, Homo sapiens
tgttttccatcatttggttgcgctgacctaggaatgttgg

SEQ ID NO: 93665 - DNA, 40 bp, Homo sapiens
ccaacattcctaggtcagcgcaaccaaatgatggaaaaca

SEQ ID NO: 93666 - DNA, 40 bp, Homo sapiens
gttttccatcatttggttgcgctgacctaggaatgttggt

SEQ ID NO: 93667 - DNA, 40 bp, Homo sapiens
accaacattcctaggtcagcgcaaccaaatgatggaaaac

SEQ ID NO: 93668 - DNA, 40 bp, Homo sapiens
ttttccatcatttggttgcgctgacctaggaatgttggtc

SEQ ID NO: 93669 - DNA, 40 bp, Homo sapiens
gaccaacattcctaggtcagcgcaaccaaatgatggaaaa

SEQ ID NO: 93670 - DNA, 40 bp, Homo sapiens
tttccatcatttggttgcgctgacctaggaatgttggtca

SEQ ID NO: 93671 - DNA, 40 bp, Homo sapiens
tgaccaacattcctaggtcagcgcaaccaaatgatggaaa

SEQ ID NO: 93672 - DNA, 40 bp, Homo sapiens
ttccatcatttggttgcgctgacctaggaatgttggtcat

SEQ ID NO: 93673 - DNA, 40 bp, Homo sapiens
atgaccaacattcctaggtcagcgcaaccaaatgatggaa

SEQ ID NO: 93674 - DNA, 40 bp, Homo sapiens
tccatcatttggttgcgctgacctaggaatgttggtcata

SEQ ID NO: 93675 - DNA, 40 bp, Homo sapiens
tatgaccaacattcctaggtcagcgcaaccaaatgatgga

SEQ ID NO: 93676 - DNA, 40 bp, Homo sapiens
ccatcatttggttgcgctgacctaggaatgttggtcatat

SEQ ID NO: 93677 - DNA, 40 bp, Homo sapiens
atatgaccaacattcctaggtcagcgcaaccaaatgatgg

SEQ ID NO: 93678 - DNA, 40 bp, Homo sapiens
catcatttggttgcgctgacctaggaatgttggtcatatc

SEQ ID NO: 93679 - DNA, 40 bp, Homo sapiens
gatatgaccaacattcctaggtcagcgcaaccaaatgatg

SEQ ID NO: 93680 - DNA, 40 bp, Homo sapiens
atcatttggttgcgctgacctaggaatgttggtcatatca

SEQ ID NO: 93681 - DNA, 40 bp, Homo sapiens
tgatatgaccaacattcctaggtcagcgcaaccaaatgat

SEQ ID NO: 93682 - DNA, 40 bp, Homo sapiens
tcatttggttgcgctgacctaggaatgttggtcatatcaa

SEQ ID NO: 93683 - DNA, 40 bp, Homo sapiens
ttgatatgaccaacattcctaggtcagcgcaaccaaatga

SEQ ID NO: 93684 - DNA, 40 bp, Homo sapiens
catttggttgcgctgacctaggaatgttggtcatatcaaa

SEQ ID NO: 93685 - DNA, 40 bp, Homo sapiens
tttgatatgaccaacattcctaggtcagcgcaaccaaatg

SEQ ID NO: 93686 - DNA, 40 bp, Homo sapiens
atttggttgcgctgacctaggaatgttggtcatatcaaac

SEQ ID NO: 93687 - DNA, 40 bp, Homo sapiens
gtttgatatgaccaacattcctaggtcagcgcaaccaaat

SEQ ID NO: 93688 - DNA, 40 bp, Homo sapiens
tttggttgcgctgacctaggaatgttggtcatatcaaaca

SEQ ID NO: 93689 - DNA, 40 bp, Homo sapiens
tgtttgatatgaccaacattcctaggtcagcgcaaccaaa

SEQ ID NO: 93690 - DNA, 40 bp, Homo sapiens
ttggttgcgctgacctaggaatgttggtcatatcaaacat

SEQ ID NO: 93691 - DNA, 40 bp, Homo sapiens
atgtttgatatgaccaacattcctaggtcagcgcaaccaa

SEQ ID NO: 93692 - DNA, 40 bp, Homo sapiens
tggttgcgctgacctaggaatgttggtcatatcaaacatt

SEQ ID NO: 93693 - DNA, 40 bp, Homo sapiens
aatgtttgatatgaccaacattcctaggtcagcgcaacca

SEQ ID NO: 93694 - DNA, 40 bp, Homo sapiens
ggttgcgctgacctaggaatgttggtcatatcaaacatta

SEQ ID NO: 93695 - DNA, 40 bp, Homo sapiens
taatgtttgatatgaccaacattcctaggtcagcgcaacc

SEQ ID NO: 93696 - DNA, 40 bp, Homo sapiens
gttgcgctgacctaggaatgttggtcatatcaaacattaa

SEQ ID NO: 93697 - DNA, 40 bp, Homo sapiens
ttaatgtttgatatgaccaacattcctaggtcagcgcaac

SEQ ID NO: 93698 - DNA, 40 bp, Homo sapiens
ttgcgctgacctaggaatgttggtcatatcaaacattaaa

SEQ ID NO: 93699 - DNA, 40 bp, Homo sapiens
tttaatgtttgatatgaccaacattcctaggtcagcgcaa

SEQ ID NO: 93700 - DNA, 40 bp, Homo sapiens
tgcgctgacctaggaatgttggtcatatcaaacattaaaa

SEQ ID NO: 93701 - DNA, 40 bp, Homo sapiens
ttttaatgtttgatatgaccaacattcctaggtcagcgca

SEQ ID NO: 93702 - DNA, 40 bp, Homo sapiens
gcgctgacctaggaatgttggtcatatcaaacattaaaaa

SEQ ID NO: 93703 - DNA, 40 bp, Homo sapiens
tttttaatgtttgatatgaccaacattcctaggtcagcgc

SEQ ID NO: 93704 - DNA, 40 bp, Homo sapiens
cgctgacctaggaatgttggtcatatcaaacattaaaaat

SEQ ID NO: 93705 - DNA, 40 bp, Homo sapiens
atttttaatgtttgatatgaccaacattcctaggtcagcg

SEQ ID NO: 93706 - DNA, 40 bp, Homo sapiens
gctgacctaggaatgttggtcatatcaaacattaaaaatg

SEQ ID NO: 93707 - DNA, 40 bp, Homo sapiens
catttttaatgtttgatatgaccaacattcctaggtcagc

SEQ ID NO: 93708 - DNA, 40 bp, Homo sapiens
ctgacctaggaatgttggtcatatcaaacattaaaaatga

SEQ ID NO: 93709 - DNA, 40 bp, Homo sapiens
tcatttttaatgtttgatatgaccaacattcctaggtcag

SEQ ID NO: 93710 - DNA, 40 bp, Homo sapiens
tgacctaggaatgttggtcatatcaaacattaaaaatgac

SEQ ID NO: 93711 - DNA, 40 bp, Homo sapiens
gtcatttttaatgtttgatatgaccaacattcctaggtca

SEQ ID NO: 93712 - DNA, 40 bp, Homo sapiens
gacctaggaatgttggtcatatcaaacattaaaaatgacc

SEQ ID NO: 93713 - DNA, 40 bp, Homo sapiens
ggtcatttttaatgtttgatatgaccaacattcctaggtc

SEQ ID NO: 93714 - DNA, 40 bp, Homo sapiens
acctaggaatgttggtcatatcaaacattaaaaatgacca

SEQ ID NO: 93715 - DNA, 40 bp, Homo sapiens
tggtcatttttaatgtttgatatgaccaacattcctaggt

SEQ ID NO: 93716 - DNA, 40 bp, Homo sapiens
cctaggaatgttggtcatatcaaacattaaaaatgaccac

SEQ ID NO: 93717 - DNA, 40 bp, Homo sapiens
gtggtcatttttaatgtttgatatgaccaacattcctagg

SEQ ID NO: 93718 - DNA, 40 bp, Homo sapiens
ctaggaatgttggtcatatcaaacattaaaaatgaccact

SEQ ID NO: 93719 - DNA, 40 bp, Homo sapiens
agtggtcatttttaatgtttgatatgaccaacattcctag

SEQ ID NO: 93720 - DNA, 40 bp, Homo sapiens
taggaatgttggtcatatcaaacattaaaaatgaccactc

SEQ ID NO: 93721 - DNA, 40 bp, Homo sapiens
gagtggtcatttttaatgtttgatatgaccaacattccta

SEQ ID NO: 93722 - DNA, 40 bp, Homo sapiens
aggaatgttggtcatatcaaacattaaaaatgaccactct

SEQ ID NO: 93723 - DNA, 40 bp, Homo sapiens
agagtggtcatttttaatgtttgatatgaccaacattcct

SEQ ID NO: 93724 - DNA, 40 bp, Homo sapiens
ggaatgttggtcatatcaaacattaaaaatgaccactctt

SEQ ID NO: 93725 - DNA, 40 bp, Homo sapiens
aagagtggtcatttttaatgtttgatatgaccaacattcc

SEQ ID NO: 93726 - DNA, 40 bp, Homo sapiens
gaatgttggtcatatcaaacattaaaaatgaccactcttt

SEQ ID NO: 93727 - DNA, 40 bp, Homo sapiens
aaagagtggtcatttttaatgtttgatatgaccaacattc

SEQ ID NO: 93728 - DNA, 40 bp, Homo sapiens
aatgttggtcatatcaaacattaaaaatgaccactctttt

SEQ ID NO: 93729 - DNA, 40 bp, Homo sapiens
aaaagagtggtcatttttaatgtttgatatgaccaacatt

SEQ ID NO: 93730 - DNA, 40 bp, Homo sapiens
atgttggtcatatcaaacattaaaaatgaccactctttta

SEQ ID NO: 93731 - DNA, 40 bp, Homo sapiens
taaaagagtggtcatttttaatgtttgatatgaccaacat

SEQ ID NO: 93732 - DNA, 40 bp, Homo sapiens
tgttggtcatatcaaacattaaaaatgaccactcttttaa

SEQ ID NO: 93733 - DNA, 40 bp, Homo sapiens
ttaaaagagtggtcatttttaatgtttgatatgaccaaca

SEQ ID NO: 93734 - DNA, 40 bp, Homo sapiens
gttggtcatatcaaacattaaaaatgaccactcttttaat

SEQ ID NO: 93735 - DNA, 40 bp, Homo sapiens
attaaaagagtggtcatttttaatgtttgatatgaccaac

SEQ ID NO: 93736 - DNA, 40 bp, Homo sapiens
ttggtcatatcaaacattaaaaatgaccactcttttaatt

SEQ ID NO: 93737 - DNA, 40 bp, Homo sapiens
aattaaaagagtggtcatttttaatgtttgatatgaccaa

SEQ ID NO: 93738 - DNA, 40 bp, Homo sapiens
tggtcatatcaaacattaaaaatgaccactcttttaattg

SEQ ID NO: 93739 - DNA, 40 bp, Homo sapiens
caattaaaagagtggtcatttttaatgtttgatatgacca

SEQ ID NO: 93740 - DNA, 40 bp, Homo sapiens
ggtcatatcaaacattaaaaatgaccactcttttaattga

SEQ ID NO: 93741 - DNA, 40 bp, Homo sapiens
tcaattaaaagagtggtcatttttaatgtttgatatgacc

SEQ ID NO: 93742 - DNA, 40 bp, Homo sapiens
gtcatatcaaacattaaaaatgaccactcttttaattgaa

SEQ ID NO: 93743 - DNA, 40 bp, Homo sapiens
ttcaattaaaagagtggtcatttttaatgtttgatatgac

SEQ ID NO: 93744 - DNA, 40 bp, Homo sapiens
tcatatcaaacattaaaaatgaccactcttttaattgaaa

SEQ ID NO: 93745 - DNA, 40 bp, Homo sapiens
tttcaattaaaagagtggtcatttttaatgtttgatatga

SEQ ID NO: 93746 - DNA, 40 bp, Homo sapiens
catatcaaacattaaaaatgaccactcttttaattgaaat

SEQ ID NO: 93747 - DNA, 40 bp, Homo sapiens
atttcaattaaaagagtggtcatttttaatgtttgatatg

SEQ ID NO: 93748 - DNA, 40 bp, Homo sapiens
atatcaaacattaaaaatgaccactcttttaattgaaatt

SEQ ID NO: 93749 - DNA, 40 bp, Homo sapiens
aatttcaattaaaagagtggtcatttttaatgtttgatat

SEQ ID NO: 93750 - DNA, 40 bp, Homo sapiens
tatcaaacattaaaaatgaccactcttttaattgaaatta

SEQ ID NO: 93751 - DNA, 40 bp, Homo sapiens
taatttcaattaaaagagtggtcatttttaatgtttgata

SEQ ID NO: 93752 - DNA, 40 bp, Homo sapiens
atcaaacattaaaaatgaccactcttttaattgaaattaa

SEQ ID NO: 93753 - DNA, 40 bp, Homo sapiens
ttaatttcaattaaaagagtggtcatttttaatgtttgat

SEQ ID NO: 93754 - DNA, 40 bp, Homo sapiens
tcaaacattaaaaatgaccactcttttaattgaaattaac

SEQ ID NO: 93755 - DNA, 40 bp, Homo sapiens
gttaatttcaattaaaagagtggtcatttttaatgtttga

SEQ ID NO: 93756 - DNA, 40 bp, Homo sapiens
caaacattaaaaatgaccactcttttaattgaaattaact

SEQ ID NO: 93757 - DNA, 40 bp, Homo sapiens
agttaatttcaattaaaagagtggtcatttttaatgtttg

SEQ ID NO: 93758 - DNA, 40 bp, Homo sapiens
aaacattaaaaatgaccactcttttaattgaaattaactt

SEQ ID NO: 93759 - DNA, 40 bp, Homo sapiens
aagttaatttcaattaaaagagtggtcatttttaatgttt

SEQ ID NO: 93760 - DNA, 40 bp, Homo sapiens
aacattaaaaatgaccactcttttaattgaaattaacttt

SEQ ID NO: 93761 - DNA, 40 bp, Homo sapiens
aaagttaatttcaattaaaagagtggtcatttttaatgtt

SEQ ID NO: 93762 - DNA, 40 bp, Homo sapiens
acattaaaaatgaccactcttttaattgaaattaactttt

SEQ ID NO: 93763 - DNA, 40 bp, Homo sapiens
aaaagttaatttcaattaaaagagtggtcatttttaatgt

SEQ ID NO: 93764 - DNA, 40 bp, Homo sapiens
cattaaaaatgaccactcttttaattgaaattaactttta

SEQ ID NO: 93765 - DNA, 40 bp, Homo sapiens
taaaagttaatttcaattaaaagagtggtcatttttaatg

SEQ ID NO: 93766 - DNA, 40 bp, Homo sapiens
attaaaaatgaccactcttttaattgaaattaacttttaa

SEQ ID NO: 93767 - DNA, 40 bp, Homo sapiens
ttaaaagttaatttcaattaaaagagtggtcatttttaat

SEQ ID NO: 93768 - DNA, 40 bp, Homo sapiens
ttaaaaatgaccactcttttaattgaaattaacttttaaa

SEQ ID NO: 93769 - DNA, 40 bp, Homo sapiens
tttaaaagttaatttcaattaaaagagtggtcatttttaa

SEQ ID NO: 93770 - DNA, 40 bp, Homo sapiens
taaaaatgaccactcttttaattgaaattaacttttaaat

SEQ ID NO: 93771 - DNA, 40 bp, Homo sapiens
atttaaaagttaatttcaattaaaagagtggtcattttta

SEQ ID NO: 93772 - DNA, 40 bp, Homo sapiens
aaaaatgaccactcttttaattgaaattaacttttaaatg

SEQ ID NO: 93773 - DNA, 40 bp, Homo sapiens
catttaaaagttaatttcaattaaaagagtggtcattttt

SEQ ID NO: 93774 - DNA, 40 bp, Homo sapiens
aaaatgaccactcttttaattgaaattaacttttaaatgt

SEQ ID NO: 93775 - DNA, 40 bp, Homo sapiens
acatttaaaagttaatttcaattaaaagagtggtcatttt

SEQ ID NO: 93776 - DNA, 40 bp, Homo sapiens
aaatgaccactcttttaattgaaattaacttttaaatgtt

SEQ ID NO: 93777 - DNA, 40 bp, Homo sapiens
aacatttaaaagttaatttcaattaaaagagtggtcattt

SEQ ID NO: 93778 - DNA, 40 bp, Homo sapiens
aatgaccactcttttaattgaaattaacttttaaatgttt

SEQ ID NO: 93779 - DNA, 40 bp, Homo sapiens
aaacatttaaaagttaatttcaattaaaagagtggtcatt

SEQ ID NO: 93780 - DNA, 40 bp, Homo sapiens
atgaccactcttttaattgaaattaacttttaaatgttta

SEQ ID NO: 93781 - DNA, 40 bp, Homo sapiens
taaacatttaaaagttaatttcaattaaaagagtggtcat

SEQ ID NO: 93782 - DNA, 40 bp, Homo sapiens
tgaccactcttttaattgaaattaacttttaaatgtttat

SEQ ID NO: 93783 - DNA, 40 bp, Homo sapiens
ataaacatttaaaagttaatttcaattaaaagagtggtca

SEQ ID NO: 93784 - DNA, 40 bp, Homo sapiens
gaccactcttttaattgaaattaacttttaaatgtttata

SEQ ID NO: 93785 - DNA, 40 bp, Homo sapiens
tataaacatttaaaagttaatttcaattaaaagagtggtc

SEQ ID NO: 93786 - DNA, 40 bp, Homo sapiens
accactcttttaattgaaattaacttttaaatgtttatag

SEQ ID NO: 93787 - DNA, 40 bp, Homo sapiens
ctataaacatttaaaagttaatttcaattaaaagagtggt

SEQ ID NO: 93788 - DNA, 40 bp, Homo sapiens
ccactcttttaattgaaattaacttttaaatgtttatagg

SEQ ID NO: 93789 - DNA, 40 bp, Homo sapiens
cctataaacatttaaaagttaatttcaattaaaagagtgg

SEQ ID NO: 93790 - DNA, 40 bp, Homo sapiens
cactcttttaattgaaattaacttttaaatgtttatagga

SEQ ID NO: 93791 - DNA, 40 bp, Homo sapiens
tcctataaacatttaaaagttaatttcaattaaaagagtg

SEQ ID NO: 93792 - DNA, 40 bp, Homo sapiens
actcttttaattgaaattaacttttaaatgtttataggag

SEQ ID NO: 93793 - DNA, 40 bp, Homo sapiens
ctcctataaacatttaaaagttaatttcaattaaaagagt

SEQ ID NO: 93794 - DNA, 40 bp, Homo sapiens
ctcttttaattgaaattaacttttaaatgtttataggagt

SEQ ID NO: 93795 - DNA, 40 bp, Homo sapiens
actcctataaacatttaaaagttaatttcaattaaaagag

SEQ ID NO: 93796 - DNA, 40 bp, Homo sapiens
tcttttaattgaaattaacttttaaatgtttataggagta

SEQ ID NO: 93797 - DNA, 40 bp, Homo sapiens
tactcctataaacatttaaaagttaatttcaattaaaaga

SEQ ID NO: 93798 - DNA, 40 bp, Homo sapiens
cttttaattgaaattaacttttaaatgtttataggagtat

SEQ ID NO: 93799 - DNA, 40 bp, Homo sapiens
atactcctataaacatttaaaagttaatttcaattaaaag

SEQ ID NO: 93800 - DNA, 40 bp, Homo sapiens
ttttaattgaaattaacttttaaatgtttataggagtatg

SEQ ID NO: 93801 - DNA, 40 bp, Homo sapiens
catactcctataaacatttaaaagttaatttcaattaaaa

SEQ ID NO: 93802 - DNA, 40 bp, Homo sapiens
tttaattgaaattaacttttaaatgtttataggagtatgt

SEQ ID NO: 93803 - DNA, 40 bp, Homo sapiens
acatactcctataaacatttaaaagttaatttcaattaaa

SEQ ID NO: 93804 - DNA, 40 bp, Homo sapiens
ttaattgaaattaacttttaaatgtttataggagtatgtg

SEQ ID NO: 93805 - DNA, 40 bp, Homo sapiens
cacatactcctataaacatttaaaagttaatttcaattaa

SEQ ID NO: 93806 - DNA, 40 bp, Homo sapiens
taattgaaattaacttttaaatgtttataggagtatgtgc

SEQ ID NO: 93807 - DNA, 40 bp, Homo sapiens
gcacatactcctataaacatttaaaagttaatttcaatta

SEQ ID NO: 93808 - DNA, 40 bp, Homo sapiens
aattgaaattaacttttaaatgtttataggagtatgtgct

SEQ ID NO: 93809 - DNA, 40 bp, Homo sapiens
agcacatactcctataaacatttaaaagttaatttcaatt

SEQ ID NO: 93810 - DNA, 40 bp, Homo sapiens
attgaaattaacttttaaatgtttataggagtatgtgctg

SEQ ID NO: 93811 - DNA, 40 bp, Homo sapiens
cagcacatactcctataaacatttaaaagttaatttcaat

SEQ ID NO: 93812 - DNA, 40 bp, Homo sapiens
ttgaaattaacttttaaatgtttataggagtatgtgctgt

SEQ ID NO: 93813 - DNA, 40 bp, Homo sapiens
acagcacatactcctataaacatttaaaagttaatttcaa

SEQ ID NO: 93814 - DNA, 40 bp, Homo sapiens
tgaaattaacttttaaatgtttataggagtatgtgctgtg

SEQ ID NO: 93815 - DNA, 40 bp, Homo sapiens
cacagcacatactcctataaacatttaaaagttaatttca

SEQ ID NO: 93816 - DNA, 40 bp, Homo sapiens
gaaattaacttttaaatgtttataggagtatgtgctgtga

SEQ ID NO: 93817 - DNA, 40 bp, Homo sapiens
tcacagcacatactcctataaacatttaaaagttaatttc

SEQ ID NO: 93818 - DNA, 40 bp, Homo sapiens
aaattaacttttaaatgtttataggagtatgtgctgtgaa

SEQ ID NO: 93819 - DNA, 40 bp, Homo sapiens
ttcacagcacatactcctataaacatttaaaagttaattt

SEQ ID NO: 93820 - DNA, 40 bp, Homo sapiens
aattaacttttaaatgtttataggagtatgtgctgtgaag

SEQ ID NO: 93821 - DNA, 40 bp, Homo sapiens
cttcacagcacatactcctataaacatttaaaagttaatt

SEQ ID NO: 93822 - DNA, 40 bp, Homo sapiens
attaacttttaaatgtttataggagtatgtgctgtgaagt

SEQ ID NO: 93823 - DNA, 40 bp, Homo sapiens
acttcacagcacatactcctataaacatttaaaagttaat

SEQ ID NO: 93824 - DNA, 40 bp, Homo sapiens
ttaacttttaaatgtttataggagtatgtgctgtgaagtg

SEQ ID NO: 93825 - DNA, 40 bp, Homo sapiens
cacttcacagcacatactcctataaacatttaaaagttaa

SEQ ID NO: 93826 - DNA, 40 bp, Homo sapiens
taacttttaaatgtttataggagtatgtgctgtgaagtga

SEQ ID NO: 93827 - DNA, 40 bp, Homo sapiens
tcacttcacagcacatactcctataaacatttaaaagtta

SEQ ID NO: 93828 - DNA, 40 bp, Homo sapiens
aacttttaaatgtttataggagtatgtgctgtgaagtgat

SEQ ID NO: 93829 - DNA, 40 bp, Homo sapiens
atcacttcacagcacatactcctataaacatttaaaagtt

SEQ ID NO: 93830 - DNA, 40 bp, Homo sapiens
acttttaaatgtttataggagtatgtgctgtgaagtgatc

SEQ ID NO: 93831 - DNA, 40 bp, Homo sapiens
gatcacttcacagcacatactcctataaacatttaaaagt

SEQ ID NO: 93832 - DNA, 40 bp, Homo sapiens
cttttaaatgtttataggagtatgtgctgtgaagtgatct

SEQ ID NO: 93833 - DNA, 40 bp, Homo sapiens
agatcacttcacagcacatactcctataaacatttaaaag

SEQ ID NO: 93834 - DNA, 40 bp, Homo sapiens
ttttaaatgtttataggagtatgtgctgtgaagtgatcta

SEQ ID NO: 93835 - DNA, 40 bp, Homo sapiens
tagatcacttcacagcacatactcctataaacatttaaaa

SEQ ID NO: 93836 - DNA, 40 bp, Homo sapiens
tttaaatgtttataggagtatgtgctgtgaagtgatctaa

SEQ ID NO: 93837 - DNA, 40 bp, Homo sapiens
ttagatcacttcacagcacatactcctataaacatttaaa

SEQ ID NO: 93838 - DNA, 40 bp, Homo sapiens
ttaaatgtttataggagtatgtgctgtgaagtgatctaaa

SEQ ID NO: 93839 - DNA, 40 bp, Homo sapiens
tttagatcacttcacagcacatactcctataaacatttaa

SEQ ID NO: 93840 - DNA, 40 bp, Homo sapiens
taaatgtttataggagtatgtgctgtgaagtgatctaaaa

SEQ ID NO: 93841 - DNA, 40 bp, Homo sapiens
ttttagatcacttcacagcacatactcctataaacattta

SEQ ID NO: 93842 - DNA, 40 bp, Homo sapiens
aaatgtttataggagtatgtgctgtgaagtgatctaaaat

SEQ ID NO: 93843 - DNA, 40 bp, Homo sapiens
attttagatcacttcacagcacatactcctataaacattt

SEQ ID NO: 93844 - DNA, 40 bp, Homo sapiens
aatgtttataggagtatgtgctgtgaagtgatctaaaatt

SEQ ID NO: 93845 - DNA, 40 bp, Homo sapiens
aattttagatcacttcacagcacatactcctataaacatt

SEQ ID NO: 93846 - DNA, 40 bp, Homo sapiens
atgtttataggagtatgtgctgtgaagtgatctaaaattt

SEQ ID NO: 93847 - DNA, 40 bp, Homo sapiens
aaattttagatcacttcacagcacatactcctataaacat

SEQ ID NO: 93848 - DNA, 40 bp, Homo sapiens
tgtttataggagtatgtgctgtgaagtgatctaaaatttg

SEQ ID NO: 93849 - DNA, 40 bp, Homo sapiens
caaattttagatcacttcacagcacatactcctataaaca

SEQ ID NO: 93850 - DNA, 40 bp, Homo sapiens
gtttataggagtatgtgctgtgaagtgatctaaaatttgt

SEQ ID NO: 93851 - DNA, 40 bp, Homo sapiens
acaaattttagatcacttcacagcacatactcctataaac

SEQ ID NO: 93852 - DNA, 40 bp, Homo sapiens
tttataggagtatgtgctgtgaagtgatctaaaatttgta

SEQ ID NO: 93853 - DNA, 40 bp, Homo sapiens
tacaaattttagatcacttcacagcacatactcctataaa

SEQ ID NO: 93854 - DNA, 40 bp, Homo sapiens
ttataggagtatgtgctgtgaagtgatctaaaatttgtaa

SEQ ID NO: 93855 - DNA, 40 bp, Homo sapiens
ttacaaattttagatcacttcacagcacatactcctataa

SEQ ID NO: 93856 - DNA, 40 bp, Homo sapiens
tataggagtatgtgctgtgaagtgatctaaaatttgtaat

SEQ ID NO: 93857 - DNA, 40 bp, Homo sapiens
attacaaattttagatcacttcacagcacatactcctata

SEQ ID NO: 93858 - DNA, 40 bp, Homo sapiens
ataggagtatgtgctgtgaagtgatctaaaatttgtaata

SEQ ID NO: 93859 - DNA, 40 bp, Homo sapiens
tattacaaattttagatcacttcacagcacatactcctat

SEQ ID NO: 93860 - DNA, 40 bp, Homo sapiens
taggagtatgtgctgtgaagtgatctaaaatttgtaatat

SEQ ID NO: 93861 - DNA, 40 bp, Homo sapiens
atattacaaattttagatcacttcacagcacatactccta

SEQ ID NO: 93862 - DNA, 40 bp, Homo sapiens
aggagtatgtgctgtgaagtgatctaaaatttgtaatatt

SEQ ID NO: 93863 - DNA, 40 bp, Homo sapiens
aatattacaaattttagatcacttcacagcacatactcct

SEQ ID NO: 93864 - DNA, 40 bp, Homo sapiens
ggagtatgtgctgtgaagtgatctaaaatttgtaatattt

SEQ ID NO: 93865 - DNA, 40 bp, Homo sapiens
aaatattacaaattttagatcacttcacagcacatactcc

SEQ ID NO: 93866 - DNA, 40 bp, Homo sapiens
gagtatgtgctgtgaagtgatctaaaatttgtaatatttt

SEQ ID NO: 93867 - DNA, 40 bp, Homo sapiens
aaaatattacaaattttagatcacttcacagcacatactc

SEQ ID NO: 93868 - DNA, 40 bp, Homo sapiens
agtatgtgctgtgaagtgatctaaaatttgtaatattttt

SEQ ID NO: 93869 - DNA, 40 bp, Homo sapiens
aaaaatattacaaattttagatcacttcacagcacatact

SEQ ID NO: 93870 - DNA, 40 bp, Homo sapiens
gtatgtgctgtgaagtgatctaaaatttgtaatatttttg

SEQ ID NO: 93871 - DNA, 40 bp, Homo sapiens
caaaaatattacaaattttagatcacttcacagcacatac

SEQ ID NO: 93872 - DNA, 40 bp, Homo sapiens
tatgtgctgtgaagtgatctaaaatttgtaatatttttgt

SEQ ID NO: 93873 - DNA, 40 bp, Homo sapiens
acaaaaatattacaaattttagatcacttcacagcacata

SEQ ID NO: 93874 - DNA, 40 bp, Homo sapiens
atgtgctgtgaagtgatctaaaatttgtaatatttttgtc

SEQ ID NO: 93875 - DNA, 40 bp, Homo sapiens
gacaaaaatattacaaattttagatcacttcacagcacat

SEQ ID NO: 93876 - DNA, 40 bp, Homo sapiens
tgtgctgtgaagtgatctaaaatttgtaatatttttgtca

SEQ ID NO: 93877 - DNA, 40 bp, Homo sapiens
tgacaaaaatattacaaattttagatcacttcacagcaca

SEQ ID NO: 93878 - DNA, 40 bp, Homo sapiens
gtgctgtgaagtgatctaaaatttgtaatatttttgtcat

SEQ ID NO: 93879 - DNA, 40 bp, Homo sapiens
atgacaaaaatattacaaattttagatcacttcacagcac

SEQ ID NO: 93880 - DNA, 40 bp, Homo sapiens
tgctgtgaagtgatctaaaatttgtaatatttttgtcatg

SEQ ID NO: 93881 - DNA, 40 bp, Homo sapiens
catgacaaaaatattacaaattttagatcacttcacagca

SEQ ID NO: 93882 - DNA, 40 bp, Homo sapiens
gctgtgaagtgatctaaaatttgtaatatttttgtcatga

SEQ ID NO: 93883 - DNA, 40 bp, Homo sapiens
tcatgacaaaaatattacaaattttagatcacttcacagc

SEQ ID NO: 93884 - DNA, 40 bp, Homo sapiens
ctgtgaagtgatctaaaatttgtaatatttttgtcatgaa

SEQ ID NO: 93885 - DNA, 40 bp, Homo sapiens
ttcatgacaaaaatattacaaattttagatcacttcacag

SEQ ID NO: 93886 - DNA, 40 bp, Homo sapiens
tgtgaagtgatctaaaatttgtaatatttttgtcatgaac

SEQ ID NO: 93887 - DNA, 40 bp, Homo sapiens
gttcatgacaaaaatattacaaattttagatcacttcaca

SEQ ID NO: 93888 - DNA, 40 bp, Homo sapiens
gtgaagtgatctaaaatttgtaatatttttgtcatgaact

SEQ ID NO: 93889 - DNA, 40 bp, Homo sapiens
agttcatgacaaaaatattacaaattttagatcacttcac

SEQ ID NO: 93890 - DNA, 40 bp, Homo sapiens
tgaagtgatctaaaatttgtaatatttttgtcatgaactg

SEQ ID NO: 93891 - DNA, 40 bp, Homo sapiens
cagttcatgacaaaaatattacaaattttagatcacttca

SEQ ID NO: 93892 - DNA, 40 bp, Homo sapiens
gaagtgatctaaaatttgtaatatttttgtcatgaactgt

SEQ ID NO: 93893 - DNA, 40 bp, Homo sapiens
acagttcatgacaaaaatattacaaattttagatcacttc

SEQ ID NO: 93894 - DNA, 40 bp, Homo sapiens
aagtgatctaaaatttgtaatatttttgtcatgaactgta

SEQ ID NO: 93895 - DNA, 40 bp, Homo sapiens
tacagttcatgacaaaaatattacaaattttagatcactt

SEQ ID NO: 93896 - DNA, 40 bp, Homo sapiens
agtgatctaaaatttgtaatatttttgtcatgaactgtac

SEQ ID NO: 93897 - DNA, 40 bp, Homo sapiens
gtacagttcatgacaaaaatattacaaattttagatcact

SEQ ID NO: 93898 - DNA, 40 bp, Homo sapiens
gtgatctaaaatttgtaatatttttgtcatgaactgtact

SEQ ID NO: 93899 - DNA, 40 bp, Homo sapiens
agtacagttcatgacaaaaatattacaaattttagatcac

SEQ ID NO: 93900 - DNA, 40 bp, Homo sapiens
tgatctaaaatttgtaatatttttgtcatgaactgtacta

SEQ ID NO: 93901 - DNA, 40 bp, Homo sapiens
tagtacagttcatgacaaaaatattacaaattttagatca

SEQ ID NO: 93902 - DNA, 40 bp, Homo sapiens
gatctaaaatttgtaatatttttgtcatgaactgtactac

SEQ ID NO: 93903 - DNA, 40 bp, Homo sapiens
gtagtacagttcatgacaaaaatattacaaattttagatc

SEQ ID NO: 93904 - DNA, 40 bp, Homo sapiens
atctaaaatttgtaatatttttgtcatgaactgtactact

SEQ ID NO: 93905 - DNA, 40 bp, Homo sapiens
agtagtacagttcatgacaaaaatattacaaattttagat

SEQ ID NO: 93906 - DNA, 40 bp, Homo sapiens
tctaaaatttgtaatatttttgtcatgaactgtactactc

SEQ ID NO: 93907 - DNA, 40 bp, Homo sapiens
gagtagtacagttcatgacaaaaatattacaaattttaga

SEQ ID NO: 93908 - DNA, 40 bp, Homo sapiens
ctaaaatttgtaatatttttgtcatgaactgtactactcc

SEQ ID NO: 93909 - DNA, 40 bp, Homo sapiens
ggagtagtacagttcatgacaaaaatattacaaattttag

SEQ ID NO: 93910 - DNA, 40 bp, Homo sapiens
taaaatttgtaatatttttgtcatgaactgtactactcct

SEQ ID NO: 93911 - DNA, 40 bp, Homo sapiens
aggagtagtacagttcatgacaaaaatattacaaatttta

SEQ ID NO: 93912 - DNA, 40 bp, Homo sapiens
aaaatttgtaatatttttgtcatgaactgtactactccta

SEQ ID NO: 93913 - DNA, 40 bp, Homo sapiens
taggagtagtacagttcatgacaaaaatattacaaatttt

SEQ ID NO: 93914 - DNA, 40 bp, Homo sapiens
aaatttgtaatatttttgtcatgaactgtactactcctaa

SEQ ID NO: 93915 - DNA, 40 bp, Homo sapiens
ttaggagtagtacagttcatgacaaaaatattacaaattt

SEQ ID NO: 93916 - DNA, 40 bp, Homo sapiens
aatttgtaatatttttgtcatgaactgtactactcctaat

SEQ ID NO: 93917 - DNA, 40 bp, Homo sapiens
attaggagtagtacagttcatgacaaaaatattacaaatt

SEQ ID NO: 93918 - DNA, 40 bp, Homo sapiens
atttgtaatatttttgtcatgaactgtactactcctaatt

SEQ ID NO: 93919 - DNA, 40 bp, Homo sapiens
aattaggagtagtacagttcatgacaaaaatattacaaat

SEQ ID NO: 93920 - DNA, 40 bp, Homo sapiens
tttgtaatatttttgtcatgaactgtactactcctaatta

SEQ ID NO: 93921 - DNA, 40 bp, Homo sapiens
taattaggagtagtacagttcatgacaaaaatattacaaa

SEQ ID NO: 93922 - DNA, 40 bp, Homo sapiens
ttgtaatatttttgtcatgaactgtactactcctaattat

SEQ ID NO: 93923 - DNA, 40 bp, Homo sapiens
ataattaggagtagtacagttcatgacaaaaatattacaa

SEQ ID NO: 93924 - DNA, 40 bp, Homo sapiens
tgtaatatttttgtcatgaactgtactactcctaattatt

SEQ ID NO: 93925 - DNA, 40 bp, Homo sapiens
aataattaggagtagtacagttcatgacaaaaatattaca

SEQ ID NO: 93926 - DNA, 40 bp, Homo sapiens
gtaatatttttgtcatgaactgtactactcctaattattg

SEQ ID NO: 93927 - DNA, 40 bp, Homo sapiens
caataattaggagtagtacagttcatgacaaaaatattac

SEQ ID NO: 93928 - DNA, 40 bp, Homo sapiens
taatatttttgtcatgaactgtactactcctaattattgt

SEQ ID NO: 93929 - DNA, 40 bp, Homo sapiens
acaataattaggagtagtacagttcatgacaaaaatatta

SEQ ID NO: 93930 - DNA, 40 bp, Homo sapiens
aatatttttgtcatgaactgtactactcctaattattgta

SEQ ID NO: 93931 - DNA, 40 bp, Homo sapiens
tacaataattaggagtagtacagttcatgacaaaaatatt

SEQ ID NO: 93932 - DNA, 40 bp, Homo sapiens
atatttttgtcatgaactgtactactcctaattattgtaa

SEQ ID NO: 93933 - DNA, 40 bp, Homo sapiens
ttacaataattaggagtagtacagttcatgacaaaaatat

SEQ ID NO: 93934 - DNA, 40 bp, Homo sapiens
tatttttgtcatgaactgtactactcctaattattgtaat

SEQ ID NO: 93935 - DNA, 40 bp, Homo sapiens
attacaataattaggagtagtacagttcatgacaaaaata

SEQ ID NO: 93936 - DNA, 40 bp, Homo sapiens
atttttgtcatgaactgtactactcctaattattgtaatg

SEQ ID NO: 93937 - DNA, 40 bp, Homo sapiens
cattacaataattaggagtagtacagttcatgacaaaaat

SEQ ID NO: 93938 - DNA, 40 bp, Homo sapiens
tttttgtcatgaactgtactactcctaattattgtaatgt

SEQ ID NO: 93939 - DNA, 40 bp, Homo sapiens
acattacaataattaggagtagtacagttcatgacaaaaa

SEQ ID NO: 93940 - DNA, 40 bp, Homo sapiens
ttttgtcatgaactgtactactcctaattattgtaatgta

SEQ ID NO: 93941 - DNA, 40 bp, Homo sapiens
tacattacaataattaggagtagtacagttcatgacaaaa

SEQ ID NO: 93942 - DNA, 40 bp, Homo sapiens
tttgtcatgaactgtactactcctaattattgtaatgtaa

SEQ ID NO: 93943 - DNA, 40 bp, Homo sapiens
ttacattacaataattaggagtagtacagttcatgacaaa

SEQ ID NO: 93944 - DNA, 40 bp, Homo sapiens
ttgtcatgaactgtactactcctaattattgtaatgtaat

SEQ ID NO: 93945 - DNA, 40 bp, Homo sapiens
attacattacaataattaggagtagtacagttcatgacaa

SEQ ID NO: 93946 - DNA, 40 bp, Homo sapiens
tgtcatgaactgtactactcctaattattgtaatgtaata

SEQ ID NO: 93947 - DNA, 40 bp, Homo sapiens
tattacattacaataattaggagtagtacagttcatgaca

SEQ ID NO: 93948 - DNA, 40 bp, Homo sapiens
gtcatgaactgtactactcctaattattgtaatgtaataa

SEQ ID NO: 93949 - DNA, 40 bp, Homo sapiens
ttattacattacaataattaggagtagtacagttcatgac

SEQ ID NO: 93950 - DNA, 40 bp, Homo sapiens
tcatgaactgtactactcctaattattgtaatgtaataaa

SEQ ID NO: 93951 - DNA, 40 bp, Homo sapiens
tttattacattacaataattaggagtagtacagttcatga

SEQ ID NO: 93952 - DNA, 40 bp, Homo sapiens
catgaactgtactactcctaattattgtaatgtaataaaa

SEQ ID NO: 93953 - DNA, 40 bp, Homo sapiens
ttttattacattacaataattaggagtagtacagttcatg

SEQ ID NO: 93954 - DNA, 40 bp, Homo sapiens
atgaactgtactactcctaattattgtaatgtaataaaaa

SEQ ID NO: 93955 - DNA, 40 bp, Homo sapiens
tttttattacattacaataattaggagtagtacagttcat

SEQ ID NO: 93956 - DNA, 40 bp, Homo sapiens
tgaactgtactactcctaattattgtaatgtaataaaaat

SEQ ID NO: 93957 - DNA, 40 bp, Homo sapiens
atttttattacattacaataattaggagtagtacagttca

SEQ ID NO: 93958 - DNA, 40 bp, Homo sapiens
gaactgtactactcctaattattgtaatgtaataaaaata

SEQ ID NO: 93959 - DNA, 40 bp, Homo sapiens
tatttttattacattacaataattaggagtagtacagttc

SEQ ID NO: 93960 - DNA, 40 bp, Homo sapiens
aactgtactactcctaattattgtaatgtaataaaaatag

SEQ ID NO: 93961 - DNA, 40 bp, Homo sapiens
ctatttttattacattacaataattaggagtagtacagtt

SEQ ID NO: 93962 - DNA, 40 bp, Homo sapiens
actgtactactcctaattattgtaatgtaataaaaatagt

SEQ ID NO: 93963 - DNA, 40 bp, Homo sapiens
actatttttattacattacaataattaggagtagtacagt

SEQ ID NO: 93964 - DNA, 40 bp, Homo sapiens
ctgtactactcctaattattgtaatgtaataaaaatagtt

SEQ ID NO: 93965 - DNA, 40 bp, Homo sapiens
aactatttttattacattacaataattaggagtagtacag

SEQ ID NO: 93966 - DNA, 40 bp, Homo sapiens
tgtactactcctaattattgtaatgtaataaaaatagtta

SEQ ID NO: 93967 - DNA, 40 bp, Homo sapiens
taactatttttattacattacaataattaggagtagtaca

SEQ ID NO: 93968 - DNA, 40 bp, Homo sapiens
gtactactcctaattattgtaatgtaataaaaatagttac

SEQ ID NO: 93969 - DNA, 40 bp, Homo sapiens
gtaactatttttattacattacaataattaggagtagtac

SEQ ID NO: 93970 - DNA, 40 bp, Homo sapiens
tactactcctaattattgtaatgtaataaaaatagttaca

SEQ ID NO: 93971 - DNA, 40 bp, Homo sapiens
tgtaactatttttattacattacaataattaggagtagta

SEQ ID NO: 93972 - DNA, 40 bp, Homo sapiens
actactcctaattattgtaatgtaataaaaatagttacag

SEQ ID NO: 93973 - DNA, 40 bp, Homo sapiens
ctgtaactatttttattacattacaataattaggagtagt

SEQ ID NO: 93974 - DNA, 40 bp, Homo sapiens
ctactcctaattattgtaatgtaataaaaatagttacagt

SEQ ID NO: 93975 - DNA, 40 bp, Homo sapiens
actgtaactatttttattacattacaataattaggagtag

SEQ ID NO: 93976 - DNA, 40 bp, Homo sapiens
tactcctaattattgtaatgtaataaaaatagttacagtg

SEQ ID NO: 93977 - DNA, 40 bp, Homo sapiens
cactgtaactatttttattacattacaataattaggagta

SEQ ID NO: 93978 - DNA, 40 bp, Homo sapiens
actcctaattattgtaatgtaataaaaatagttacagtga

SEQ ID NO: 93979 - DNA, 40 bp, Homo sapiens
tcactgtaactatttttattacattacaataattaggagt

SEQ ID NO: 93980 - DNA, 40 bp, Homo sapiens
ctcctaattattgtaatgtaataaaaatagttacagtgac

SEQ ID NO: 93981 - DNA, 40 bp, Homo sapiens
gtcactgtaactatttttattacattacaataattaggag
